United States Patent Application Publication US 2004/0005560 A1 - sequence listing, part 3

SEQ ID NO: 2084 - DNA, 1808 bp, Homo sapiens
aggtggccggtcgggctggaagggcggggatgagggatgggacgcatccccgggggatgctcctccaaagcttttatcgggcgagcgcagtggctcacgcctgtaattcctgcactttgggaggctaagggtctcactctattgtctaggctcgaatgcagtgacgtgatcatggatcactgcagtcctcaacttactgggctcaggatgaaaggcttcctagcacaaacaccacccctggagttcccggtacatcaataccagcctggggatcacgttctcatcaagagttggaagagggaaagcttgaaccagcttaggaggacctcatctggtactcttgatgaatgaaacagcaatctgaatggctgaaaaaggatggacccagcactccagggagaaaacttggcattctttgggaatctaacaggatgcagtgaacccaagccttttgaagagctcaccaatcagactgcccttgtctatccatgagcagatgtttgatagtattgcggaggccctctagtgggtatgctgccaagcaactggagtggcacttgggctctaatccagttgtctatccctttcaccctggcatttcatcagccaaacaaaaaccaactaactcagaaaaaaaggaaagcccctcaagggtcctttgaccccgatatctacatagatgctatcggggtcccctgaggggtaccaaacgaattcaaagctcgaaatcaaatagctgctggattcaagtctgtccttttcttgtggtctactataaataaaaatgtagactggataaattacatatactataaccaacaacgatttgtcaattacaccagggatgccattaaaggaatagctgaacaattgggtttcaccagccaaatggcctgggaaaatagaatagctcttgacatgatattagtggagaaaggtgaagtccaatgttgtacctgtatccccaataatacagcccctgatgtaactatcactaagggtctataaggcctcaccactctaggaaatgaactagctgaaaattcgggaatgaatgatccctttacaggtgtaatggaaaaaatggtttggtagatggaaaggactaatggcctctattctcacctcccttgtgatcataataggggtgctcattctcttagggtgctgtattataccctgtgtctgcggactagttcaaaagctcatagaaacagcccttaccaagacctcccacaactctcccccaccctattcagataaacgtttatttctaagcaaccaagaagagcagtgaagccagatcctgttagaaatatatgaagaggaaggactacaaaatcaaaaggggaaaattattagacaaaatgagttgctctacaaaggtccaacttcgttgtcctttgttctgtaacctttgttctgtaaactgcccttcccgcagaaactgtctttcccgccgaccaaaactgcccttcactatcactgtaatccatacccctactctatttgaaactgccaatcgggatcagcttacattgtgtggttcaaccaccagccaatgaggaaaaaacacagaagcaaaagctatgatgcattagggttaaaaaccccttcctttccctgtccaatgtgctcttgagactgctacaggcgcaagcagccaccttctgcagaagtaaaccttgccttgctgagaaatttttcttttgagtgctggtctctctctgtggcaccaagaacttatttctaacatggagtgatttccaagatatatggttaagtgaaaataaaaactgttgccaggc

SEQ ID NO: 2085 - DNA, 2014 bp, Homo sapiens
gttcgtggatgtccgttgtgtcccgagactaggacgtggctccagggtgttccagaccctggaagggcctctcttcaaagacccgtgtttccagaacggtggcagcgggctcacgtggcttggggagagcaggcactgggggagctgggtgaggacaggcgagcccaggctcgactggtggccccaaggggcgcccgtgcccgctgtgatgatagcagcgcccaggtctctctctagcccccagagtgcggccactaaggttttgggtcggcctgggtggaatggaggcaggatggggccccccaaactcctgtcactgctgcagggactgcccagagcagctgcaagtggggctggcagggatgaggaggaggtggcctgggcttgggggaccatgtacatcctgagttggaacccaggggagcagcaggtttggggccatgatgaggagagacctaggggttgcccgacggagagaaaagggacaggaagaggcaggagcttcagagactactcaatgccactctagcctgagggactggaacttagtccgggggcattagggagccatgggaggatcaggagcaggggcaagtcaggatcaaactcccatgagaagccagccggccaaatccaggctgatgtggcaagaatggcagctgcccagggctgtgtgggagccagacacggcccctcgcttcccggaagaggccacgtgaagccgaagcaggatgcaggagggcgtcccaggcagagacctgggcgtgggagcggtccgcagctcagagtggctggagcatcatgtgcgatttggggtgctgaggagtgctcgggccagctggtccttttcccatccctccccatgaaggagggaggctggtagctttgccagcagctgcgccgcggcaggggtggcccatggacctgcctgagggcccggtgggtggccccactgcggaaatgtacctccgggagcggcctgaggaggcaaggctgggaatgccggtcagcttggaggagcaaatactcaactccacgttcgaagcttgtgaccctcagaggacaggcactgtggctgtggcccaggtgctggcctacctggaggctgtgacaggccagggcccccaggatgcacgcctccaaacattggccaacagcctggaccccaatggggagggccctaaggccactgtggacttggacactttcctggttgtcatgcgtgactggattgctgcctgtcaactacatgggggattagagctggaagaggagaccgccttccagggagccctgacctcccagcaactgccatctggatgcccagaagctgaggagccagccaacctggagagcttcggaggcgaagaccccagacccgagctacaagccacagctgacctgctgagcagcctggaggacctggagctcagcaaccgacgtctggttggggagaatgccaaactgcagcggagcatggagacagctgaggaggggtcagcacgccttggggaggagatcttggctctgcgtaagcagcttcacagcacccagcaggccctgcagtttgccaaggccatggatgaggagctggaggacctgaagactctggccaggagcctggaggaacagaatcgcagccttctggcccaagcccggcaggcggaaaaggagcagcagcatctggtggctgagatggagactctgcaggaggaggtgagcggaggcccagcaccacccccaccccttccccagtccttaaggtcttcttgacaccactcccttctgcccccaacaccccagcagcctgtcttggggagacctcagaatgtcagtagtgtgggaatgtccctgaggttatatcacactgtgagaacagccgtggtttacaagagtgtgaggcatggggtcagcctacatggcttcgggctgaggccacctccataagagtggaccagtccctcccttctctgtgcctcagttgcctcacctataaagatgaacaaaacaatgg

SEQ ID NO: 2086 - DNA, 1941 bp, Homo sapiens
catccaggagcagtgtgagtccttggggcctggcctggccgtcctctgcaaaaactacctcttccagttttttgtccctgctgaccaagcactgaggcttctccccccgcaggagctctgcaggaaggggggattctgtgaggagctaggggcacctgcccgtttgactcaagtagtggccatggacggggtcccctccctggagctggggttgccaaggaaacagagcgagatgcagatgaaggccggtgtgacctgtgaggtgtgcatgaacgtggtgcagaagctggaccactggctcatgtccaacagctctgagctcatgatcacccatgccctggagcgcgtgtgctcggtaatgcctgcctctatcacgaaggagtgcatcatcttggtggacacctacagcccctccttggtgcagcttgtggccaaaatcaccccagagaaggtgtgcaagttcatccgtctgtgtggcaaccggaggcgggcccgggcagtccatgatgcctatgccatcgtgccgtccccagagtgggatgcggagaaccagggcagcttctgcaatgggtgcaagaggctgctcacggtgtcctcccacaacctggagagcaagagcaccaagcgagacatcctggtggccttcaagggtggctgcagcatcctgccgctgccctatatgatccagtgcaagcacttcgtcacccagtacgagcccgtgctcattgagagtctcaaggacatgatggaccccgtggctgtgtgcaagaaggtgggggcctgccacggccccaggaccccactgctgggcaccgaccagtgtgccctgggcccaagcttctggtgcaggagccaggaggccgccaagctgtgcaacgctgtgcaacactgccagaagcatgtatagaaagagatgcacctccacgctggggaacacgcgtgaccgtggctgccagagacccagagcctgttaccgaggcccatgaggtgggtgctttccccatccccatttcacaaatgaaaaactgaagctctgaggagggaggctgggaaggagcagagctgaagttcaaaaccaagtattcctgatcccgaaagcctctctcttaacaacggtgccgcacagctttgcccttgaaagcatctctactggaccggaacacactcatgtgccccgctccctgacccagcctgcccatgggctcaggtgcccctttaccttctgctggatggacatctggctgtgagccaggctggggtcatggccggggtgagcggaggcaggggtggacggaggcttcgagggcccatcactagtagggtcattacctcttgccaacagccgggggtgggagtctgggtctcgctcaggccagagcttctcaacctggagtccctgggggtggctgccaaaggtgtgtatgacaagcacgtatccctggacatttccggggagaggtctggggctttggtcacattctccaagggctgctgggcttcggagcagtccccccccatgtctcagccactacagggtccctctctctccttgcaccccagaccctccgctgccctggtaatgagcagaaggaaagtcttggggtgtgctcaaagtcaggagagcaaaatatgccaggcaaaagctcccgggaaaagccggaggagtctggggtggccaccgggatgtggagcagcgagggcaaagacggtgaacacagccctccagctgtctgagcctcagttttctaatctgtagaatggggatgatcatacctgcctcacaagaatgttgagacaattcacagagacgttctggagcccctttcccccgagaccggcattcatgagtctgctgggaccagaaaacccatctcaggggcccagcggggcacccaggagagtctggcggtgcaagcgctgtataaaccacaagcgttctcc

SEQ ID NO: 2087 - DNA, 2233 bp, Homo sapiens
aattaagatgtctcaactaaaagtttcacttgaactcagcgttcattctgcagaggaaattgaagggaaggtgcaaggcatgaacgtctcaaagctcaggaacacaagggtgaatgtggacttccagaagcagacggtagatcctatgcaagtctcctttaacacatcagacaggtcccagacagttacagatctccttctaactattgatgtcacagaggtggttgaagtgggacacttttggggatacaggattgatgaaaacaactcagagattctgaaaaagcttactgctgaaatcaaccaactgacgctggtgcccttgcccactcacccacatccagacttggtttgtctggcaccttttgctgattttgataaacaacgctactttagagctcaagtcctttatgtttctggaaattctgctgaggtattctttgtagattatggcaataagtctcatgtagatctacatcttttgatggagattccctgtcaatttcttgaacttcctttccaggctttggaatttaagatttgcaaaatgagaccatcagcaaagtctcttgtttgtggcaagcactggagtgacggggccagccagtggttcgcctctctggtgagcggctgcaccctccttgtgaaggtcttctctgtggtgcacagcgtcctgcacgtggatgtgtaccagtactcaggggtccaggatgccatcaacataagagacgtcctcatccagcagggctatgccgagctcacggaggagtcctacgagtccaagcaaagccatgaagttctcaagggcctcttttccaagtcagtagaaaacatgacagatggctctgtgccctttcccatgaaagacgacgagaaatatctcatccggattttgttagagagcttttctaccaataaactgggtactccaaactgtaaggcagaacttcacgggccttttaacccttatgaactaaagtgccatagtttgaccagaatatccaaattcaggtgtgtttggattgagaaggagagcatcaactctgtcattatcagtgacgcccctgaagaccttcaccagagaatgctggttgcagcttccctttccatcaatgcgactggatctacgatgctgctgagagaaacctctctgatgcctcatatccctggcctcccggctctcctcagcatgttattcgcaccggtgatagagttaaggattgatcagaatggcaagtactatactggagtcctttgtggtttggggtggaatccagctacaggggcttccatactgcccgagcacgacatggagcttgcgtttgactttcaattcagcgtggaggatgtcgtcgaggttaatattctcagggctgctattaacaagctagtctgtgatggaccaaatggatgcaagtgtcttgggccagagagagttgcgcagcttcaagacattgcccgtcagaagcttttaggtttgttctgtcagtcaaaaccaagggagaagattgttcccaagtggcatgaaaagccctacgagtggaatcaggttgatccaaagctggtcatggagcaggccgaccgtgagagcagcagagggaagaacacctttctctaccagctccacaaactggttgtgctcggcacctgagcatgtccacaggtggcctccagcacacccctcgggaagctgtggaggctggattccaggctccctccgcagactgactttcctctgtgtctgggtgttacagtctgtgcccactgcatcctaaaggccttttctttcttcttttctctttgggtgatagtcagagagtggtgtttttgttcaggtgggaaggattggaaactctagtcttttctagaaacagaaaatcactgtattaaatattttggaaagattgttctgaaagaagtctgtttggataaagagctgtattttgctttaaatttattaaggtaaatataagtagttaatcttagatgtaaggttccagaatgtgcttacatattctgttctgttacagtgatttaaaccagtagtataggaaaaaacttaaaaaacaaaaaaaccatgtagtattttctgatttttttttccatgagggaaaatatctaatttttataagactaagttgagttatacttcttggttcacattttggaaatcagagattacagattacatggccatagcttatctgtgttaaaacaataaaagcattaaatg

SEQ ID NO: 2088 - DNA, 1820 bp, Homo sapiens
ggaatcccagcttcaccctgtcaactgcttaggaatccgggcttttgctgatatgcatgcatgtaccgaccttctgaacaaggccaacacctatgcaggtggagaagccgaggacgggctcagggaaccggagacggagaaggcgttgtcctcttcactgcacgcgccctggaccagtgccggccctgatcatgcagctcttccaggcccactgcttcttcctgtccactaggccacagctgccctccaggcccactatgcacacatcttcccctccaaggtttgttctgcccctgccctgactcccagccctgtgggggtcccgaccccacctcacctggctcagactctgatgctgccctggctgccccaccactgcctctgcccgagagtcacgtgaggctgagagtaggggcaggggcagcagtggtgccagttggggggcggtccagtgggaggagcctcagcctcgtgggctgttctgtgggactgatgactgcatgatcttctgggcacctcacggatcttcaactgcaggtgaaacggatgctggtggtgggtgcagggccactgggagccactgcatggtcccagaggctggactggggcaggtgccaactgaagctgctggggcagcatgggcaggatgttctgcacacaaaccttggagaagaaaatgtatgcatagcgggtccactgctgctgccctgccctgactcccagccctgcctgaccccacctcaccctgctcaggctctggtgcaactctgggtgccttgccactgcctctgccccagagttggggcctcgacagcctggctggaaggggacaccccagccctgcctcaacacctgggtccctccataactaccacaggcagatgggcgaccccaaagaagatcccaggactcacagtaccccctgagaacatggacagtatgtgggggtagccatggaggtcaggatggttatcttctcccgggtaaagccatttaatcctttcagtttgggatggaataaggcctgctttttttaatttttttttgagacggagtcttgctctgtcgcccaggctggagtgcagtggtgcgatcttggctcactgcaaccttttcctgcctggttcacgcaattctcctgcctcagccttccgggtagctgagattacaggtacacgctaccacgttcggctaatttttgtatttttagtacagacggggcttcaccatcttggccaggctgatttcgatctcctgacatcgtgatccgcctgcctccacctcccaaagtgctgggattacaggtgtgagccaccaggcctggccaaggccagctcctcttatatatacccactatccctgcagctgtaccaggggaaagcttggcagtttccctcctccgagcccctgtacatatcatgaagtgtgggaccttcagagcttttcacttttcagaaaatagctcctgctggggctacaggatggagtgtgaagagggccttgggccacagggaggtgcctgtcgactatggggagttcatgcaccccttctttccccagaggggctggactcaggtgagtatgggggtggaagctcctgcacttcgacacaggcagcgggagggttttctccccattccctctgctatcccaacttgagttgtactttttaagaaagtgattcaccctgcccttgcgcccttccccagaacagaacacgttgatcatggggatattttttattgtgccaaaaagttgccatcactgtcattaaacctgtttaacaccaaataataaggaaaataaaataaaaaattcgg

SEQ ID NO: 2089 - DNA, 2285 bp, Homo sapiens
aaaaccagtagacttctgtggacgtgcgtcgccgctggactctcacccgtcttctctgagagatccacgggatagtcccctgatcctagaattgggcagggccgacccagggtgaagaaacctcaagcggactcccagggctgcagatcgaaatccctaaggatcccaggggacccgcaggatgtgtcaggcatgcctaggcggtgtgggggcttgaaatcgcccttagacagcctctgagacactttctcaacctcacctgccccggtgggatgccaactccaggtgtcagacctctgctccaccttggactagcctttgtcgtggttcctgcctttcccagacgaccgtgctgggaagcaggagcccctgtgaggcccaggatgaaggaagacagtgagcttaaggacacaggaatcttccgctagcaccatcatccagaattttaactaaaattccatctcaaagagacccctcaaaaactcacaagactgtatctccagcccaatgggacccgattcctacacacagcctttttcgggaatggaatcagaaacgcagtttccatggcccaactcacagtctcaaagcctgtcctcctccagcgggacagggccacggagacaaactaaggaagccctacggtgagcaacgttgggggcccgcagtacttgttgcaggcagcctatttcctgagaccaggcaggctctgcctgcaccattttccttgcttaggtaggctgaaaaccctgacagcctggtgaccgaaactgcctcatgcatgcaccagtggcggggcaccaggagcaagtagtgagcgcgggctcgagtcacagtgaatgccttcgttgcatctcgacaagtctctgactcttggcaaagagggggtcctctgtgacgtgcgtcggagttggacttccggttgtcttctctggggatccatgggatactcccacgatccaggatacaatagaggcagaccattctgaggaaatgtcaagtagcacttagcacctgcccgccctccaccttctccaccacccagcaggagcggggcggcctggatctgttttctgcccctgaccagggggccgcgtcttcggcaaagtcttcggggtgagaggtcccgctcctggaggacagcgggatgggagagtcccgttcacacccagccccgcagagccggatagaaacgctgccactgccgactgcatgctgccgggaagtgcactgtggaggccactttctggaaagaaggaaccgtctgaacacaaagttgctcaagccatgttcatctatctgccagggaaacggaggccctgagtgccagagtccaagtcaccctgcaagagaaaactctggtggagcccagggtgtccagcccctgtccacccagccgccgtggtcaaggttaataagggcaaggggccaagcagaaccgcctacaaggaaccgagtgtccacaaagcaggaagcgaagaacgtttctcctacctagagcgcagccgttttgcggaaggcacagtccgggctccgggagccaagcagggatccgggcctcgttgcggaggggacgcccgggctgagctgagctcacttgctggcggcggcagcccctgcagtcatggggtcaccggcttgtggagaggggctggcgctgttccttggccccgctccccgcccgcaaagggccgggaggtcgggctcccggcagtgtccaggctctcgcccgccggtgccttgagccgtacccaccgcgtcccctccgccccaatagctggtgctgagggtccggcccgtggtcatctggcagggccgtgcggctcctgcgggtgaccgggagcgcggagccccttcccactcgggctcgggtggcctcacctttcctggggctgcgtccccgcgggacgccaggttcccggattcttctaggtcgccctggttcctggcagctcctggtgccacgcggtcctctacggtctcctctgacctgagagggacagtgagatggggctggcggggatgggggtccccgcgctgttggaaagcagcggggctgctgctgaccggagccgcctgggtctgttctggaaccgtcgccctggggcccctccgccccgcaaacgctcgggatgcggtttgggagtgtagctggacaccgagcaccatccacgctcagccccacggggctccaggagtcccgagcccaagcccctgcacttgcattttatttaaaaaacctgagggttaaattcgggcaagtcagttgcctcagtgtttgtcgc

SEQ ID NO: 2090 - DNA, 2032 bp, Homo sapiens
gtggaaagttggggaggggcgcgggagggcgcatgcgcatgtggctcctgggactggctggagcgggagttgagcgggaagtcggggtgggggtatgttgggaggcgtggcgggatgggagcgttgggaaaagggcagtgctgggggatggggacgaggatgaagcttcctcgacccagctcacccattctcctcacagggcgttctgcaaactcggctgaagcaaaggttttgagcttcctgatggtccctgcctccatttctagaaactgcttaggcgaacactccaagtgatcagcctgtccgattcctcctccctctggccgttgctttctctgtggcttccagtttctggagatcccatgctaagaagtttctctcagcgaatcccctcaaacctttgggatggaaataattcccatttcacagatataaagcaggctccaaaactctttgaagttcctttgctaatcatgactagccaagcctctggcgttcaaacgcacaaattccggcctccagtgctggggttctcagccatggctacaatttctgtattgaaacttccacctcccctcgctgttctctgtgacttttcctcttggctgcattggttttggctggtactatccttactctttcaaggtcacggtcccctgagggtgataaccagaaccttatgcttcctttgtgttcccaggcggggacttagccactgcctctgatcagatttttcagttgtctgatgggcagcaccgaatgattgcttgtgctctccagaacccaactgcctcatcccgcacaggccagcgctttcccttggctgcccagtcaccctgcctgggaatcatctctaatgctactatttctctgcacacacacgcacacacacacacacaaaccttcactggcttcccattgcctctcttgagtgtcagcgcctcggtcggtcattcaaggctccgtgatgtgacttcaagactttcaggctgtgtctccacacatctccccatatgcttcctcaccccctggtagttctttatatatcaccttgaaatgtctctcttctcatctcctatctccgcctgatgcaatccttctgtgcctcatggcccttcctggtagttttttattttgttgttgttgttgttttatttaattgaggcaggggcttgccctttagcccaggagaatgcagtggcatgatcacagctcactgctgcctcgacctccgtcagcctccctagctcaacgatcctctcacctcagcctcctgagtaactgggactacaggcacagctcactatgcccagctaatttttgtattttctgtacacacagggtttcatcatgttgtccaggctggtcttgaacccctgggctcaagcaatcagcccacctctgcctcccaaagcgttgagattacaagcgtgagccaccattcctggaccctcgtagtttttctggagcctcgtgatttgatatgatcttcctgccgctgattcctcacagtattggcttgccacacctccaggggcactgatcacattctacctggcattatttcatctgagtccctgtcctagcccttctgcccattagactgtaaccttgtttagggaaagatctgtgtcttactcatctgtgattttgttgttgttgttgttttgagacagggtcttgccctgttgcccaggctggagagcagtggtgcaatcttggctcactgcagcctcaacctgttggggtcaagccatcctcccacctcagctttccaagtagctgagactacaggcctgtgccaccacacccagctagttttttgtatttttagtagagatggggttttgccatgttgcccaggcttctcttgaactcctgagctcaagggatctgcctgcctcggcctcccaaagtgctgggattacaggcgtgagccactgtgcctgacccactcacctgtcattgtagtacttaagatgccttgttcatttattgtgcctgtgcaataaatacaccttgatttgagttt

SEQ ID NO: 2091 - DNA, 1518 bp, Homo sapiens
agagccagttccaaccccgggatcgccgcggaaccacgcacagagtctgcagaagtgcacagctttatcgacagcgcttgaagcatggagtctcttcgcgggtacacccacagtgatattggctaccgcagcctggcagtcgacgaggacatcgaggaagtgaatgatgagaaacttaccgtgacctcgctgatggcaaggggaggagaggacgaggagaatacacggtccaaacctgagtacggaacagaagcggaaaacaacgttggcacggaagggtccgtcccctcggacgaccaagaccgtgagggtggcggcggccacgagccggagcaacagcaggaggagccgcccctgaccaagccggagcaacagcaggaggagccgcccctgctcgagctgaagcaagagcaggaggagccgccccagacgaccgtggaggggccacagccggcggaggggccacaaaccgctgagggaccacagcccccagagaggaaacgccgccgccgcaccgcgttcacgcagtttcagctgcaggagctagagaactttttcgatgaatctcaatatcccgacgttgtggcgcgagagagacttgcagcacgcctgaatttgactgaagacagagtgcaggtttggtttcagaacagaagagccaagtggaaacgaaatcagagggtgctaatgttgagaaacactgctactgctgacctggcccaccctttggacatgttcttgggtggggcctattatgctgctcctgctctggatcctgctttgtgtgttcatctggtgccacaactacctagaccacctgtgctgcctgtgccacctatgccacccaggccacccatggtccctatgccacccaggccacccatagcacctatgccacccatggcgcctgtgccacccggctcacgcatggcgcctgtgccacccgggccacgcatggcgcctgtgccaccctggccgcccatggcgcctgtgccaccctggccgcccatggcgcctgtgccaaccgggccgcccatggcgcctgtgccacccgggccgcccatggcgcgtgtgccacccgggccgcccatggcgcgtgtgccacccgggccgcccatggcgcgtgtgccacccgggccgcccatggcgcctctgccacccgggccgcccatggcgcctctgccacccgggccgcccatggcgcctctgccacccgggccgcccatggcgcctctgccacccaggtcacatgtgcctcacactggcctggctcctgtacacatcacatgggcccctgtcatcaacagttattatgcatgtccctttttctaaagtaaggtattcataacagtttttccaaagttctttcctgccagatagaaattgtgcacagcacagcatcaagtaattcgttagatgcttgttaaatgaagtgggtaggtgaacaaagttaacgaatgccctgttatttttgtaggccacataattgtagtattttcaataaagatgtgacttaat

SEQ ID NO: 2092 - DNA, 2537 bp, Homo sapiens
agagcatcgtagcggcaggcggggtgcagctccaggtcgaagactcggaatgagagggacacagtctggccctcggggacctgatagcggggacagaggcggggacccacagagtcaggccccacacaacccagccagagggcagctcccctgccccaagcgtttcttgcagaaacggactgaatgggaaggggcctccatgaattcccggaatcctcctcggccccccttccagactcccgcctcactctgcctggcagtccagggacaggagccgcctaactacttccagatgtggacacagccacgaggcggtaggggggagggggtggagagatggagggagctgcagtggcgatggccctctgattgaacctggaggccaggctccgcgagctccacaccttagccctgcccctgttccaaactacttcagattctgactcccaagtctccactcactgccccctcctccccctacaatccctctcgaattccttcctggaatccagctaccaggcaagttcaggagcttggctctctcttgggttctatggggggtcaaggatctgggtgggtggggagacttaagagaccagaggacgaaggtgggggaatgggagcagtggtggcctgcaggagaccaaggtcttgcagcagatggggaggatttgggggccagagaagggtgaggcggtggggaatctggggagtggtgtgtcagcaagggaacccaaaatatctccaggcataaccccaaaggaatcgggggtctgaagttcactggagctgtctggaagatgccaagagacctacctggtgtagttgggggtctggccctgggcaaaaggcagcagggcgcaggcagtgaggaggggccccaggagggaggctgtggctgcaggcagcatggccccgggggaaaggcgctggggtcctcaagacagaggcagcagctgaattttgcagagcagcagcagcggtggcggcagcagcaggataatcagcgccagatggggcagccttggacctgggccagactaggccaaggagaaggaattctcacccatgacctcttccaactacttgaagccctctgcagcatgtccagggcctcccagaagaagtccttctgtgcggccatcaggggcatccaccctacgatctccttcatcttctccgtgcggtcctgcaacgtttggcaactgtggatctggctgagcttgacgaaggaggcactccccttgtgccagcctgggaggcggcccccagccccacagccgcagcccagcagctccttgctgaactctgagctctggctcagcaccagggagtggttgaggccgcaccacagggtgatgggccgctgcagaaaatcagctccttgcctgagcccagggcctgctgtggtgtacccctcattctcagcccacccgtctatgccagtccagcctctcatcctgcctgccagcctcggggagacttgcttcttgtgcaattccagcagggtctgaggaatctgcaggaaacagtttgcaaaagccattgctttgggccacacctgtgaggagcagtagagcccgctgggtctcctgaccaaccagcacgatctgcttgaaggtcattgagtggtggaatgtcatcttgaagacccgctgcccactagactgcagatagacctcaacacagtcacaggcccggctgctggtggtacccaccacttcctgcggctcccgagtggccaagacgtagagggccggactccagaaccctgatcttggaggcgcggactgagtctgcgacagatgcgtctccacacgccttccccatcgcacacttcgtggaagtagcggcaggactcaccagctctggggggaacaactggatggaaatcggatttcctttccccctcttctcttcaaccccaagctccgagccacaagaagggcagcttctcttcacctacccaagaaggggtgcatagggtcccatgagggtcccacatccttttttcccttctctccgcctaccttggggctcatctgactctagctgggcacagttatttcctcccctctctctccagacccatccctaacttctccaaataactcctcccgatctcctgcggccaatccccctcacccggagcccctcctcccgtccacacagcctggtgaatttttgcagcttccgtctctggcttcccctgaccatcctgattgccccctccctgctcctgccctcctgtctcctaggcccttggcccccccgttcctgctggctttcccacaccatgtccccagcctaggcttgggggacctctgaggcccctctgcctcctaggcccctcccccatggagtctggggctaacaaacctctctgtgacctcactgtttggccactgtgacctgttccctttaatcttgcccaggacccatctcttagacagctcctgggttctagctcagttctagccatcacatggctcaagggatatgcattttactggagaaataaagtgtgaattactggt

SEQ ID NO: 2093 - DNA, 1854 bp, Homo sapiens
gacgatggcggcaatggcggtggcgctgcggggattaggagggcgcttccggtggcggacgcaggccgtggcgggcggggtgcggggcgcggcgcggggcgcagcagcaggtcagcgggactatgatctcctggtggtcggcgggggatctggtggcctggcttgtgccaaggagggcacccggtggggcctcggcggcacctgcgtcaacgtgggctgcatccccaagaagctgatgcaccaggcggcactgctgggaggcctgatccaagatgcccccaactatggctgggaggtggcccagcccgtgccgcatgactggaggaagatggcagaagctgttcaaaatcacgtgaaatccttgaactggggccaccgtgtccagcttcaggacagaaaagtcaagtactttaacatcaaagccagctttggtgacgagcacacggtttgcggcgttgccaaaggtgggaaagagattctgctgtcagccgatcacatcatcattgctactggagggcggccgagataccccacgcacatcgaaggtgccttggaatatggaatcacaagtgatgacatcttctggctgaaggaatcccctggagaaacgttggtggtcggggccagctatgtggccctggagtgtgctggcttcctcaccgggattgggctggacaccaccatcatgatgcgcagcatccccctccgcggcttcgaccagcaaatgtcctccatggtcatagagcacatggcatctcatggcacccggttcctgaggggctgtgccccctcgcgggtcaggaggctccctgatggccagctgcaggtcacctgggaggacagcaccaccggcaaggaggacacgggcacctttgacaccgtcctgtgggccataggtcgagtcccagacaccagaagtctgaatttggagaaggctggggtagatactagccccgacactcagaagatcctggtggactcccgggaagccacctctgtgccccacatctacgccattggtgacgtggtggaggggcggcctgagctgacacccacagcgatcatggccgggaggctcctggtgcagcggctcttcggcgggtcctcagatctgatggactacgacaatgttcccacgaccgtcttcaccccgctggagtatggctgtgtggggctgtccgaggaggaggcagtggctcgccacgggcaggagcatgttgaggtctatcacgcccattataaaccactggagttcacggtggctggacgagatgcatcccagtgttatgtaaagatggtgtgcctgagggagcccccacagctggtgctgggcctgcatttccttggccccaacgcaggcgaagttactcaaggatttgctctggggatcaagtgatgcggaccgtgggtatccatcccacatgctctgaggaggtagtcaagctgcgcatctccaagcgctcaggcctggaccccacggtgacaggctgctgagggtaagcgccatccctgcaggccagggcacacggtgcgcccgccgccagctcctcggaggccagacccaggatggctgcaggccaggtttggggggcctcaaccctctcctggagcgcctgtgagatggtcagcgtggagcgcaagtgctggacaggtggcccgtgtgccccacagggatggctcaggggactgtccacctcacccctgcacctctcagcctctgccgccgggcacccccccccaggctcctggtgccagatgatgacgacctgggtggaaacctaccctgtgggcacccatgtccgagccccctggcatttctgcaatgcaaataaagagggtactttttctgaagtg

SEQ ID NO: 2094 - DNA, 2202 bp, Homo sapiens
atcatgctgagaaggagccgggcgggggccggcggggctgcgagggccctgtgaggaggggcacctgccactagaagcggcctccgggtaaccggagtgccacagcgggcaggcgtcataaggacaggcctcggagaggagaggggctacccgagaatggcctcaaaaccggtttctgcccgctactcaggattgtctgccgtggtggcttctcacacaagcctgtactttcctgtgggagaatatttcctaggagcctatattccagttcatctctgacgtcataaatcatgactgtgtagaaaggccataacatgtgacacatggcagccattttggatggccagatgagaggacaatcaatccacatgcctaaatggaaccaacagacatgtgccagcttgcttctccagcctatgttctcagacacttgtagaagaccagagggaaaatggaatcagaaaaaacagcaacaacaacaaaaagccatccagggccatgcacagtggctcactcctgtaatcccaacagtttgggaggccaaggcaggtggattgcttgagctcagcagtttaagaccagcctgggcaacatggcgaaaccctttctctactaaatacaaaaactagctgggtgtggtggcatgcacctgtagtcccagctactcgggaggctgaggtgggaggatcacctgagcctgggaggttgaagctgcagtgagctgtgatggtgccactgcactcccacctgggtgacagagcaagaccctgtctcaaaaaaacaaaactaaacaaaaaaatccatgtgggaaaaggcccaatcagagccaactcactgctgggattagtagaaatgattagtcaccagaaggcaaatcgtggaagaatgaagagatgacaggacctcaggaactacacccagaggtgtagttgtgccgtaggcaaagcatcatgccggtcatccccaagaaagggagaaggggtagagctcagactcttccctgcttccccataagtccagtttaccctgggctgatcctttcagcatggcagcctccgtggggaggcacgagatccaaagatgaagatgtctatgggggtgaagaagaatggcaaactttgcaggcaagagtaggcattagagagatcagaggaggaagacaatagagaaggatgacacaggacaggctgtatctagaggatataatgccatggactttggactattccagagaggctgagagacctgtctcctgcctacaaggctccttgaactctgcacccttctttttgctaaagtgctgctgaggcctgtctcacttcccaatgaaaagcaactcaggaaattggcttcctgccccactccttctttgggagagagaaacagaactgaagaggaaggaaggaagcccaaagaaacagaggctttctttcctggctgagatttgttggcactgcccactaacatagagaataaggtggttccctaagcgagccttaagctggcatgaggctacaaacaagtgattgtatcttcgttctgctcagcagcctacctgggctggcttggacaacctcaattgtatactgaggtcttaagctggccatggcccttggtaaagcaggagaaaggaataaggctggaaggtacagaatttgcttgatgccttgcctacataattcctttgctgttgcaactggcaactctttgcttgcattatatgaaaaaaaggcggtaaaaaattgtcagaaatgtttgccaccagcctaaccccactgcccatgcattgctcccaagaaagctaattaaggcccattgctattagagttacatgattctgaaggcttgttatgacaagaaaaaataatgaagacatggttcctccaagtcataagcatccaagtcaaaacatactgcatcccaggcgagtgtggtggctcacgcctgtaatcccagcacttcgggaggccaaggcagccggatcacgaggtcaggagttcgagaccagccttgccaagatgatgaaaccccgtctctactaaaaatacaaaaattagccaggcatggtggcgggcgcctgtactcccagctactcaggaagctgaggcaggagaatcgcttgaaaccgggaggcggaggttgcaatgagccgagatcacaccactgcactgtaccctgggcgtcagagcaagactccatctc

SEQ ID NO: 2095 - DNA, 1968 bp, Homo sapiens
gaggtgcccgccccgaggccccagcgccacctgccctccaccacctaccgcggttcctccagctcccagggccgcggccggagcagctctgagcgctcggttcgccccacggtgcccttaaaaggcgctggcgcgaaccaacgagtccctgaggagagtagggggacagctccggctcgcagaatccccccaagccacccatggagggcgcagctccgtgtcgtgtctctctcaaagtgtctctcggacagcgctgttgggaacgagcctggcgctttgatttagggatgggggtggtttcctcactaacgagtcaccccctccaaaatatcgcagaaagtggacggccccagttggaggcacatcttgaaacccgcgggggaggccatgtcggaagaaggttttgtttttctcctggtgagaattcgaagaccatgtctacggaactcttctcatccacaagagaggaaggaagctctggctcaggacccagttttaggtctaatcaaaggaaaatgttaaacctgctcctggagagagacacttcctttaccgtctgtccagatgtccctagaactccagtgggcaaatttcttggtgattctgcaaacctaagcattttgtctggaggaaccccaaaacgttgcctcgatctttcgaatcttagcagtggggagataactgccactcagcttaccacttctgcagaccttgatgaaactggtcacctggattcttcaggacttcaggaagtgcatttagctgggatgaatcatgaccagcacctaatgaaatgtagcccagcacagcttctttgtagcactccgaatggtttggaccgtggccatagaaagagagatgcaatgtgtagttcatctgcaaataaagaaaatgacaatggaaacttggtggacagtgaaatgaaatatttgggcagtcccattactactgttccaaaattggataaaaatccaaacctaggagaagaccaggcagaagagatttcagatgaattaatggagttttccctgaaagatcaagaagcaaaggtgagcagaagtggcctatatcgctccccgtcgatgccagagaacttgaacaggccaagactgaagcaggtggaaaaattcaaggacaacacaataccagataaagttaaaaaaaagtatttttctggccaaggaaagctcaggaagggcttatgtttaaagaagacagtctctctgtgtgacattactatcactcagatgctggaggaagattctaaccaggggcacctgattggtgatttttccaaggtatgtgcgctgccaaccgtgtcagggaaacaccaagatctgaagtatgtcaacccagaaacagtggctgccttactgtcggggaagttccagggtctgattgagaagttttatgtcattgattgtcgctatccatatgagtatctgggaggacacatccagggagccttaaacttatatagtcaggaagaactgtttaacttctttctgaagaagcccatcgtccctttggacacccagaagagaataatcatcgtgttccactgtgaattctcctcagagaggggcccccgaatgtgccgctgtctgcgtgaagaggacaggtctctgaaccagtatcctgcattgtactacccagagctatatatccttaaaggcggctacagagacttctttccagaatatatggaactgtgtgaaccacagagctactgccctatgcatcatcaggaccacaagactgagttgctgaggtgtcgaagccagagcaaagtgcaggaaggggagcggcagctgcgggagcagattgcccttctggtgaaggacatgagcccatgataacattccagccactggctgctaacaagtcaccaaaagacactgcagaaaccctgagcagaaagaggccttctggatggccaaacccaagattattaaaagatgtctctgc

SEQ ID NO: 2096 - DNA, 1816 bp, Homo sapiens
gctgcgcgcgctggggagcacgtggggggacacgcagggactgcccgcgcgaatggcttccaacgcatgcgccccaccctacatttcacagtcgccatgacgaccaggaggtccgctagtcaacggctcgtcaacggctgcggggacaagtccgttgaggctgccaggcgagtcaggcctttctggacctcgcctgactcggctgggctgtgcctgaaattgacccagctccactaggaattatgaagaaacaaggagtaagcccaaagccgctgcaatcttcccgccccagcccgtctaagcggccctgcggggcctcccccgcccgggagcgggaggtggaaaagtcggccctaggcggcgggaaactgccggggggcgccaggaggtcctccccggggaggatcccaaatctgaaaaagcgaaaaggcttggagctaaaggtggtggccaaggcccttctcggccccttccagttcgtctgtaattccctggcgcagctccgggaagaggtgcacgaactgcaggcgcggtggttccccagcagaaccactctgcatcgccgtctttgtggcaattctacattggttacatttagtaacactttttgaaaatgatcatcatttctctcacctctcatctttggaacgggagatgactttttgcattgaaacggttaggtttcttcttctaacgaattaatttgtggtttaagaatagccagaccgagaggtgacagcatgctggcagtcctcagagcccttgcttgctctcggcacctcccctgcctgggctcccgctttggtggcatttgaggagcccttcagtcccccactgcactgtgggagcccctttctgggctggccaaggccggagcccactccctcagcttgcagggaggtgtggagggagagacacgagcgggaaccggggctgtgtgctgcacttgcgggccatctggagttccgggtgggcgtgggcttggtgggccccgcactcagagcagccagccagccctgctggccccgggcaatgggggacttagcacctgggccagtggctgcggagggtgtactgagtcccccagcagtgctggcccaccggcgctgcgctcgatttctcgctgggccttggctgccttcccacggggcagggctcgggacctgcagcccgccatgcctgagcctcctacccaatccatgggctcctgtgcggcctgagcctccccgacgagcaccaccccctgctccacggcgcccagtcccatcgaccacgcaagggctgaggaatgcgagcgcccggcacaggactggcaggcagctccacctgcagccccagtgcaggatccactaggtgaagccagctgggctcctgagtctggtggggacgtggagagtctttatatctagctcagggattgtaaatacaccaatcagcaccctgtgtttagctcaaggtttgtgagtgcaccagtcaacactctgtatctagctgctctggtgagggcgtggagagtctttatgtctagctcaaggattgtaaatacaccaatcagcactctgtgtctagctcaaggattgtaaatacaccaatcggcactctgtatctagctcaaggtttgtaaacacaccaatcagcaccctgtgtttagctcaaggtttgtgagtgcaccagtcgacactctgtatctagctgccctgatggggatgtggaagacccttccaatgcagctaaccctcccttatgtagcgtcctccttgagccgagattgtgccactgcactccagcctgggcgacaaatcaagaccccgtctcc

SEQ ID NO: 2097 - DNA, 1980 bp, Homo sapiens
ccgcatcatcctccctgctgaagaaacactttacacctcataaaacaattgctcaggaattctgggctcccagagagaccctgagtttcaaatagagatgagcttggcactcactccatgaatgactggagtgtaggggcagctgggagtcctttaagttccagcttgaagagagtgagccggagctcatctcacactcgttcacctcagacacaagaaatgaatgatgccctctccccatcccaccctttactctctctgggcaagaagcactgtctgcaaagcccctggggggaagaagcagggaaagtaggtgaggtggcccaaagccctccacaagtcctgctttcctcgcttggccttgctcccccatcttcttgggaagctgttgtcctatccattgagctgagtgtttccagtaagaacactgtcagcctctagcagcatccctccaactgccagcaccctgccattgcccagacagtctaaggccccagggtgtggccaattcagatatgatccagctacggtggggttcactgatgctgagtgtagttgggagcccttcctcttgttgttctctcctgctgctgagtctcctcttctgctcctagctaccagtaagagaggttttatcaatccccaccgtccaacaattacattcatctgcatctccggctcaagtcactgcagagtctcccagattctcacaagactgccattgtccagaaatgtgtacagaatgctcactgcaccacgttcaagcctgagaaagtcccaaatgctcaaggagtatacaacatcacagagaagacatgattaatattgaacaaacatatgcaataatccaggcaatggataagtgcccacaagtgacctagagagagggtgagatgactggggtggtctgcacaaggtgaaataagagctcaagggcagtggcaggacatgagagtccaaacacaatcaacagataccagcgagtcaggactgcagggtttgcctgagaaagttatagtgggggtatggagagggtgtgtagaaatgggatggatgggagaagttaagccaaccaagcttaaaagaaagcctattcaggaggtaggcaattaggacgtggaaaagccttctaaagtcacgtgtgggttgatgttggcttgtctccagaatgacaaaaagtagttatccttctagaaatgcaaccacagccaactggaagcagcagttatgattcaagcagtaactgtggtttttagagatcctgtaacatcatcagtgacgtagccccttctgtgaggcacaatctcagcctcacagggccacaaagaacaagtttccccatgcaggcagcttctctggatttattttctccttcttctgtatcatcattttttatcaagtggcaaagaatgtatttgaaagaagagacccttcctgctttccttccactgattggtgcttagtattcctagatcagaaagtcagccgagatacatgatgggggcagggagcaatccagcaggaaggccagggcttatcctgggttggccactggatgcattcacaattaaggtctcttccaaatccaagaacctgagtctctctacttccacccaaattttcctccatttccaaggtggctaggtacactcccccacttcccagtcaggatgtttgagtgtgtctgactatgttctttcccatgtgagcagaagaggtgcacgccacttccaagtggccataagacctcccagatgttctcctctgtgttcttccccaggtcccatgagctatactgataatgacaatggtgatagcaactttggaagccagttaatattggaatatggcaaagccactatcagcctgtttcctgagggaacgcatagagccgaactttctccctgcgcctactccaacaatctggaatgtctgccttggaatattatgtgagaaagaaataaacatctcttgtgtttg

SEQ ID NO: 2098 - DNA, 3126 bp, Homo sapiens
agacctcattgtgccctcagcgccaggctgggtgagccgagcctgcaggcccagtgcccagggccatctcaaggggcagctgggggagggaggctgggcatgagcggcactccctctggggctgcccaagttcggtctgtcccaggacccaagcccgtctggccgacctggctccctgcacactccctccctccgtgcccctcccactgtgcctctccgccctcggtcgtggccggtctgagcctccgctgcggtggccgtcggattctctgctggtgcctgcaggctcctctgcagacgttgcctcctccacatctccacgccagctgtgccaccgctgtgcagtccctgccacccctgacgacagacagcggcacgcaaagaggctcgggtgcagggggaagctcgtgttggccccggctggagtgcacatcagtcccggcttcggccgtggccacctccgcccagagccttgagtgggcattgagggggcgctgctctgcgtgaggtatgacctggacgcgtgtgacattcaagaaaaatacccggatttatttcaagtgaacctggaagtggaggtggagcccagggacaggccgagccgggaagccccaccatgggagaactcgagcatgagggggctgaaccccaaaatcctgttttccagccgggaggagcagcaagacattctgtctaagtttgggaagccggagcttccccggcagcctggctccacggctcagtatgatgctggggcagggtccccggaagccgaacccacagactctgactcaccgccaagcagcagcgcggacgccagtcgcttcctgcacacgctggactggcaggaagagaaggaggcagagactggtgcagaaaatgcctcttccaaggagagcgagtctgccctgatggaggacagagacgagagtgaggtgtcagatgaagggggatccccgatctccagcgagggccaggaacccagggccgacccagagccccccggcctggcagcagggctggtgcagcaggacttggtttttgaggtggagacaccggctgtgctgccagagcctgtgccacaggaagacggggtcgacctcctgggcctgcactccgaggtgggcgcagggccagctgtacccccgcaggcctgcaaggccccctccagcaacaccgacctgctcagctgcctccttgggccccctgaggccgcctcccaggggcccccggaggatctgctcagcgaggacccgctgctcctggcaagcccggcccctcccctgagcgtgcagagcaccccaagaggagggccccctgccgctgctgacccctttggcccgcttctgccgtcttcaggcaacaactcccagccctgctccaatcctgatctcttcggcgaatttctcaattcggactctgtgaccgtcccaccatccttcccgtctgcccacagtgctccgcccccatcctgcagcgccgacttcctgcacctgggggatctgccaggagggcccagcaagatgacagcctcgtccagcaacccagacctgctgggaggatgggctgcctggaccgagactgcagcgtcggcagtggcccccacgccagccacagaaggccccctcttctctcctggaggtcagccggccccttgtggctctcaggccagctggaccaagtctcagaacccggacccatttgctgaccttggcgacctcagctccggcctccaaggctcaccagctggattccctcctgggggcttcattcccaaaacggccaccacgcccaaaggcagcagctcctggcagacaagtcggccgccagcccagggcgcctcatggccccctcaggccaagccgccccccaaagcctgcacacagccaaggcctaactatgcctcgaacttcagtgtgatcggggcgcgggaggagcggggggtccgcgcacccagctttgctcaaaagccaaaagtctctgagaacgactttgaagatctgttgtccaatcaaggcttctcctccaggtctgacaagaaagggccaaagaccattgcagagatgaggaagcaggacctggctaaagacacggacccactcaagctgaaggcaccagggaccatccccttctccctcggagtctggggcctgggatgggccaaggggttgcaccaccagaaccagggtttgtgtcctcggtgaacatctggctgagacgagggtccctctggccccaggccctgaaacatgaagaccacctggccctgtgtcgtccggagtgggctctatatagttgagggcagggcgtgcagtgggacagtgtctgtgagccgggctgagcccaccccacgtgaccaggcacttcctcagcgtcgtgcctcagtttccgcggtgcagaggaggagggcaggcaggtgcccagggctcggcaagctccgtgtctcccgcagctcctggactggattgagggcaaggagcggaacatccgggccctgctgtccacgctgcacacagtgctgtgggacggggagagccgctggacgcccgtgggcatggccgacctggtggctccggagcaagtgaagaagcactatcgccgcgcggtgctggccgtgcaccccgacaaggctgcggggcagccgtacgagcagcacgccaagatgatcttcatggagctgaatgacgcctggtcggagtttgagaaccagggctcccggcccctcttctgaggccgcagtggtggtggctgcgcacacagctccacaggttgggagccgtcgtgggacctgggtccccaccgtgaggaccccgtgggcgacagcaggtgtggccagggtgaggctccgagccccgggtcaccgcccgcccagcgttccaggcacatgaagagaaagcattccaaagcctctgattgttgtttcctttttctcctcccgaaggaacagctgattcatgctcctcccgcaattgtcacgtctgtgatttatttggtgtttcgggcgtggcctctggagccccggcacgtggtgggccacgctgctggcgctcatgggccctggtgtttgcaccgcactttgtaatcagtcccgtggttgtctgtacagaattaaactattttccgatg

SEQ ID NO: 2099 - DNA, 3077 bp, Homo sapiens
gcgtcaggtcggggagccggtcgggttcccgctcaccgccgccgccgccgccccctgcagccactctcccgcctctaccgccgcgggagctgcatcgtccactccggtcggcggtggaaccgccagtccggggtcacagagcttgagaagcgacgcgctgagccccccatcacctccagcccgggcgacccctcccgggtccgccctcgccctgcgcagccgcccgagcccccagccccgggcggccccgctccagcatcccagctcctgcactctcgcagccgccgccgccccccgcccggaacatggactctgactcttgcgccgccgccttccacccggaggaatactcccccagttgcaagaggcgcaggaccgtggaagacttcaacaaattctgcacctttgtcttggcctatgctggctacatcccttatccgaaggaggaactccctttaaggagcagccccagccctgctaacagcactgctggtaccattgacagcgacggctgggacgcgggtttctcagacatcgcgtcctcagtgcccttgccagtctctgaccgctgctttagccacctgcagcctactctcttgcagcgagccaagcccagtaacttcctgctggacagaaggaaaacggacaagctgaagaagaagaagaagaggaagcgcagggacagtgatgcgcctgggaaagaggggtacagggggggcttgctgaagctggaagccgctgacccctacgtggagacccccacgagtcccaccttgcaggatatcccccaggctcccagcgacccctgctcgggctgggactccgatactccctcgagtggatcttgtgccactgtgtcacctgatcaggtcaaagaaataaaaactgaaggcaaacggactatcgtccggcagggaaagcaggtggtgttccgagatgaggacagcactggcaatgatgaggacatcatggtggactcagatgacgattcctgggacctcgtgacctgcttctgcatgaagccatttgccggccgccccatgatcgagtgtaatgagtgccacacctggattcacctgtcctgtgcgaaaatccggaaatccaatgttccagaagtgtttgtctgccaaaagtgccgggactccaagtttgacatccgccgttccaaccgctcgcggacgggctcccggaagctgttcctggactgactgctggctggcgaggaggctgcgagcgtggaatcggaagcgaccgcgggctttttttgcccttctcttagttgagcacagaaccctcagctctggtgcgggcagatccctgccatttaggtgcctaagcaaaaggacaggctgtccaaggtagaaactgtacatagccggtgaccgaatgcgacctttgccagccagagctgctgccagagctgcgttccctgcagtggaggtggactggacacccacgtgcagcgggtttggctcatttgaaaatgagggtccgtggtagctgtgcgttttgctatcattgctaagagattcccgctgattgggctcagtgccagctgttattctgcttccactgtgttggggagaggtgttcggtttccccagcctgttaatgaacagccatacgtgtaagctttttcttgagtgttaagtcttttaccaaaagtgtctgtacagcagccatccaagttgcccctacttagtggcttgccctctgcctgcctcagctgctgcctgaccggctgggggaggcactggcgggaggcctcgggctcccctggaagggcgctgggctggcgggtcagctggtggttcttaggtttccttctgtttgttaaaagggacaatgtggccacttctctgtggaaagggagttggttggggggtcgagatggcccgtgttcataactcagtttcctgttttgcacgatgtaaaaaccctgtctttttgcacgatacagccaaaagtattggctgatttcttgctgagtgccctcttagttggtgtgtgaggtcttggtgggctcaggccagctgtttgcgagtgtgggaactcataggttctgtctttgtctcttcctttcacctcattctggtagcagcataaaggttaggcaatcactgggacccgcatggtgttcctccaaagaatagggtaaaggagagctgggagggagccctctccgttgggtgactcttgtgtgccctttagacaggctggcctgccggttccacagggtacagttaggacttgagtctttctttttctgttttgagttggtgagtgagtgatagggtaacatgggccttcaggatgaccccttggaactgtgccgagttccttaaatctcagctgggatcctggacctgggaggcccctgtgagggccagctctggaaaaacctgggagttgatgccggaggctgtggaagaactctgctcgagggcagggtgccctggaacactggtagttctggggctgggagggagaggggctccggctttctctgaaatgaacactgctcttcagcagttcaagtacttgttctcaaaacattttctaattgattggtaggttttcataagcattgtttctttaaggcatggaaagggaagaatgctcaagcaagtcatgtttgttttcagtgggatgggcccgcgttctcactgctgggggcttccccttcatgtggcacctttgtgccaggccaccaggcagactcttcccaccttctcccactgaagcaccaaggggcttgaaccgtaatttggctaatcagaggcattttttttgtcctagtatccttcacacttgtccaaccgtcttatttttttaaaagttctgttgcttgtattaacacgaaactagagagaaatagtttctgaagccagtttattgtgaagatccccaagggggaggttcggtagagaaaaatagtaagctggtttagaaactgacgagggcaaacagccaggacgcattggagaggaatttgccaaagatctaccctgagataacgcctgtccagtgtcttcaccacgtgaataaccagcgctccaaagtgtttttctgctttg

SEQ ID NO: 2100 - DNA, 2465 bp, Homo sapiens
aaccggggagcagcaaagaggcagtagggggctgccagtgagagatgggggggcaacagctgcaaggtggacatcgagcagctggatccccgcggccggactcccctgcacctggccaccacgctggggcaccttgagtgtgcccgtgtgctcctggcgcacggcgcagacgtgggcagggagaatcgcagcggctggacaggtgggcagccctgctcaccccagccccacagccggggcctccccagcatcatagacctatggttggctgaagggtcctgccctgtgaccttgcctcgccctcccccagtgctccaggaggctgcccaggacttctacgtggagatgaaatgggagttcactagctgggtgcccctggtgtccaagatctgccctagtgacacctacaaagtgtggaagagcggccagaacctgagggtagacaccacactcctgggctttgaccacatgacctggcagcgagggaaccgcagctttgtcttcaggggccaagacacaagcgccgtggtcatggagattgaccacgaccgccgggtggtgtacacagagactctggcactggctgggcaggaccgggagctgctgctggctgctgctcagcccactgaggaacaggtgctgagccggcttaccgcgcccgtcgtcaccactcagcttgacaccaagaatatctcctttgagaggaacaagactggcatcctgggctggcgcagtgaaaagacggagatggtgaatgggtatgaagctaaggtgtatggggcatctaacgtggagctcatcacccgcacacggacagaacatctttcagaacagcacaagggcaaggtcaaaggctgtgagacacctttgcagtccttcctgggaatcgctgagcagcacgggggcccccaaaatgggaccctgatcactcagactctgagccgagccaaccccactgccatcactgcagaagaatacttcaaccccaactttgagctgggcaaccgtgatatgggccgccccatggaactgaccaccaagacacagaagttcaaggccaagctgtggctgtgtgaggagcatcccctgtccctgtgtgagcaggtggcccccatcattgacctcatggccgtcagcaatgcgctttttgccaagctccgggacttcatcaccctgcgtctgcctcctggcttcccagttaagattgaaatcccgatcttccacatcctcaacgcccgcatcaccttcgggaacctcaacggctgcgacgaaccggtgccatcggtgcgaggcagccccagcagcgagacgccttccccaggcagcgactcctccagcgtcagcagctccagctccacgacctcctgccgcggctgcgagatctccccagcgttgttcgaggccccgcgcggctacagcatgatgggcggccagcgggaggcggcgacccgggacgacgacgacgacctgctgcaattcgccatccagcagagcctgcttgaggcgggcagtgagtatgaccaggtcaccatctgggaggcgctaaccaacagcaagccaggcacccaccccatgtcctacgagggtcgccgacaggacaggagcgccccgcccacgccgcagcgccagcctgcgcccccggcgtcagtgcccagccctcggcccagctcagggccaggttccggcggccacgtgttccggagctacgacgagcagctgcggctggcgatggaactgtcggcgcaggagcaggaggagaggcggcggcgcgcgcgccaggaggaggaggagctggagcgcatcctgaggctctcactgaccgagcagtagcgccccctgccgggaccctcgccagcgccacgcgcgccacgcccagggccaggagccagacaaaccccggcctgcgcgcctgcagagcggcggctggagactggagccaccgcctcgcgggtgcagcagcacagcagggagtgtgtccaacgtagccccctggcctgtgcaagccctgactccctcatggtgcctcggagagtggggagcatattgggctggggtaagcactagacccaagtagactggacacaaagggctcgcccagggccctggcgccacccccaccccttcccaccagctgctgctagcctctgtggttgtacatcccacttgcccccacacggagactgactctaaaacccttcatccaatggtgctaacccccggctctcccctgccccacctcacccacccagagaagcacagaccccgccaggggcaggggcccaccgcacacccttgtcccgggcctgtctgggactggccttcccggctcagccagtgaggctcagaagggacacaaagagggatggaagaaaagaacaaagagaaactgttcctcccacccccttccctgatgccaggggcaccagactgattctgaggcacaaataaaagaggcttcataccgg

SEQ ID NO: 2101 - DNA, 1961 bp, Homo sapiens
atttttttcagaggggagaggaggcagctgtgggcaagaagaacctgagggaaggaagaaggggccgggccacagcaagccccaggcactggaaaggggccccagccagggctctgtgcccagaacaacctctgcgcaaaaggcaggaggaaaactggaatgaaaggctgggcagctacagcccaagggagaggacaagatgcaaaccacagagggggaaacccaggcagcccattcacagaagagtcttctccactcagagctgaagaaacacgctcaggcccacagctagcccagcaggcccctgcactaggactgcttgctgcttctccagctcagagctcattgcaggtgggcaggcgtcctgctccaatgcaagctcctgcccagaggcaaggtccgagggtagctcttctccgtgaagccagcatggcaatgcaaagccacttccaggctacatgacctgggacaggtcagacaacctcctaagcctcaatgtcttcatccacaaaatggggatagtagtatatatttcagacgactaccgtgataattacagtaacacatgtgaagttcttaccatagggcctggcccatagagagccctcaataaatggtgcctctgttgctcctggcccacccctgggcaccctctccctccctccttcactccctgtcctcaccttctgcttggtgctgaggggctgtgacttcaatttttcatccttgctcttggaaatcctcaggaactgcttgaggtctccctaagggaaaagccaggcatctcgctcagagacagagtcttgctatgttgcccaggctggtctcggactcctggcctcaggcgatcctcctgcctcagtctcccaaagtgctgggattacaagtgtgagccactgtgcccagccgcgtaagtacttgttaatggaaagactgataggactcctgcccgctcttgccccagaactagggatttgagaagcagcagtttgaggaccatggggtgagggcaaggaccagctggggaatgaagaggaaggcgcagctctgggaatgacaccctgagtggagaggagaaggctggtggctggggtaacactcatgtcacaagtggtgctaggaaggagggaggcaaagtgggttctgatatatttattctcaagtggggacaagcttttggggaggaaaaaataacaaaccaaagaaaacaagagtcagagaagatgacctggaaggcatccctgcagtgtgacagtgagaagtcccagaaaaacttaggaccaacgcccctgagatacagatggaaagactgggtgctgataaagggaaagcaggcatccaagagcagggaaggcagaagctgagcatcataaggtgggcaaagtgtaacagcaggcaggtgaggtctcggctgagattgcacgagacaaggttttcacggtgctccaaccactgactcccacctttgtaggacactgccctccctacccgagacccccacgtcccctgccaacagcataccagatccacatattccagcaccatgtagtggggctcggcctcccggcacagccccaggagccgcaccacgttggcgtggttcagcttcccaaacatctccaactccctccggaagtccagctgctgctgctcatccttgctctgcaggctcttcacaagtaccagggtctctgccactccctcctccaagccctgagcctttgccaggaacacctccccaaactcactcttccctgtgggtacagtctgagtcagccagccaccttcacccaggccgaggcagctcctgacctgggggaggggcctagcctctcccacagtggggacccacccacctgggctgggcacgagacccggttctgctgtgaccccctccctccttaggcttcagtgtctgcagcaacaaaataaaagggtgggactaatattcagcattttcc

SEQ ID NO: 2102 - DNA, 2399 bp, Homo sapiens
aaaaaactcctcaggggttagatgcagggagttatgttgtgatttgtgtaggggtggctttggtgagctcatcctggcattttaaaaataatgtgaatggtgtatccctttgtgatcatcatcactttttccctgcgagtcccaatcaatgcgggtgtgactgctgtatgaagtctcaggaagcccaccccagtggagaagaaggcttgcaggaggcaggagatgctgtccgatgaccacgtgaatgaaatcatcatacaggttgagaatgtttcctctggggtccaaagccacccatcctcaaatcagatttttcaagaaaaggtgctgctagactcaagcatcaacatggttttgtcaatatctgacattgatgtgatagactctcagacagtcagcaaaaggaatgaccaaaagggtaaccaggtgctgcggttttcaacatctttgaatgagtcgatgtctcaaacccttcatagcctagaatgcatgggcatagacactcctggttcttcacatgaaactgttcaaggacagaagttaatcgcatcccttatacccatgacatccagagacagaattaaagccatcaggaaccagccaaggaccatggaagagaaaaggaaccttaggaaaatagttgacaaagaaaaaagcaaacagacccatcgtatccttcagctcaattgctgtattcagtgtctgaactccatttcccgggcttatcggagatccaagaacagcctgtcggaaattctgaactccatcagcctgtggcagaagacgctgaagatcattggaggcaagtttggaaccagcgtcctctcctatttcaactttctgagatggcttttgaagttcaacattttctcattcatcctgaacttcagcttcatcataatccctcagtttaccgtggccaaaaagaacaccctccagttcactgggctggagtttttcactggggtgggttattttagggacacagtgatgtactatggcttttacaccaattccaccatccagcacgggaacagcggggcatcctacaacatgcagctggcctacatcttcacaatcggagcatgcttgaccacctgcttcttcagtttgctgttcagcatggccaagtatttccggaacaacttcattaatccccacatttactccggagggatcaccaagctgatcttttgctgggacttcactgtcactcatgaaaaagctgtgaagctaaaacagaagaatcttagcactgagataagggagaacctgtcagagctccgtcaggagaattccaagttgacgttcaatcagctgctgacccgcttctctgcctacatggtagcctgggttgtctctacaggagtggccatagcctgctgtgcagccgtttattacctggctgagtacaacttagagttcctgaagacacacagtaaccctggggcggtgctgttactgcctttcgttgtgtcctgcattaatctggccgtgccatgcatctactccatgttcaggcttgtggagaggtacgagatgccacggcacgaagtctacgttctcctgatccgaaacatctttttgaaaatatcaatcattggcattctttgttactattggctcaacaccgtggccctgtctggtgaagagtgttgggaaaccctcattggccaggacatctaccggctccttctgatggattttgtgttctctttagtcaattccttcctgggggagtttctgaggagaatcattgggatgcaactgatcacaagtcttggccttcaggagtttgacattgccaggaacgttctagaactgatctatgcacaaactctggtgtggattggcatcttcttctgccccctgctgccctttatccaaatgattatgcttttcatcatgttctactccaaaaatatcagcctgatgatgaatttccagcctccgagcaaagcctggcgggcctcacagatgatgactttcttcatcttcttgctctttttcccatccttcaccggggtcttgtgcaccctggccatcaccatctggagattgaagccttcagctgactgtggcccttttcgaggtctgcctctcttcattcactccatctacagctggatcgacaccctaagtacacggcctggctacctgtgggttgtttggatctatcggaacctcattggaagtgtgcacttctttttcatcctcaccctcattgtgctaatcatcacctatctttactggcagatcacagagggaaggaagattatgataaggctgctccatgagcagatcattaatgtaagtccccttggatccctctgatgtccgccctcaccctttttaaatgctgtataaacatcctccaaaataaagagaatactacaatg

SEQ ID NO: 2103 - DNA, 1737 bp, Homo sapiens
acctgagctgagactagtgcccctgtggaggggtagtgtgggagggcccccagggtgacacttggaggcaaaggctggttctgggcagagtcacagtgagctgggcagaagcctcgcctgaggatcccgtggccccaatttgtgtgcagatagcagaggcagcaggccgtgccgggggggcatgttgctgtaaccagtggcccaggggatgttacggtggacagtgcacctggagggcgggccccgcagggtgaaccatgctgcagtggctgtcgggcatcgggtatactccttcgggggttactgctctggtgaagactatgagacactgcgtcagatagatgtgcacattttcagtgcagatacgcacaagtggttcacaccccgagtgtcagggacagttcctggggcccgggatggacattcagcctgtgtcctaggcaagatcatgtacatttttgggggctacgagcagcaggcggactgtttttccaatgacattcacaagctagataccagcaccatgacatggactcttatctgtacaaagggcagccctgcacgctggagggacttccactcagccacaatgctgggaagtcacatgtatgtctttgggggccgtgccgaccgctttgggccattccattccaacaatgagatttactgcaaccgcattcgagtctttgacaccagaactgaggcttggctggactgtcccccgactccagtgctgcctgaggggcgccggagccactcggcctttggctacaatggggagctgtacatctttggtggttataatgcaaggctgaaccggcacttccatgacctctggaagtttaatcctgtgtcctttacctggaaaaagattgaaccgaaggggaaggggccatgtccccgccggcgccagtgctgctgtattgttggtgacaagattgtcctctttgggggtaccagtccatctcctgaggaaggcctgggagatgaatttgaccttatagatcattctgacttacacattttggactttagccctagtctgaagactctgtgcaaactggccgtgattcagtataacctagaccagtcctgtttgcctcatgatatcaggtgggagctgaatgccatgaccaccaacagcaatatcagtcgccccatcgtctcctcccatgggtaggaggaagtttctgccacctcccctcctgagcctgctgtcatcttcactgcccctgcccatctgtcacccacctgctcctttgacccctggacttggtatacctccatgtggagttgttgggcgagaggtgttctctgtgctgtgaattcagtggggagctgtagcggggtgggggctaggttcctccccccttgggccgagggccccttccccttggtgctctgtccccatccacctcctttcagctgctcctaggcctcagctctgcccagggccagccaggttctgctgggaagggaagggaatggggagaagggagaagcaagcagtgtctgagcctcaggagcttccccctccccctttgcctatcccctcccctctgcttgagccttgagccttgactgggagctgaaaggagttgcagctgttggcatgagacctccttctccccgtcttggggaggtggggaccagcagataaatcccacccttccttgagctgtcgctgtactctgaagttcagccagctcagattttataaaaattaattaaaatctc

SEQ ID NO: 2104 - DNA, 1589 bp, Homo sapiens
actggctccgcgtcggccggtcggtttggtcggttgtagtggcctcgccgcccggtccgctgtcgcagcgctcatccgcgccgggagcccttggctgcgtcgcccggcagccgcgggagcatttcctgaagacgtagtcatgcagcacgtcagcagctcccagagcagccagcgccatgtccagtggcctggggcctgccccggcgcgggcgaggagcagccagcgtgctcccagccgtccctgcccctcacactgccatcccccagccaccaactacagcagctgatggatgggtcagggctcacccagatcgcccagggagcccaggttcagctccagcacccgggtacgcccatcacagtccgagagcggagaccctcccagccccacacacagtcagggggcaccatccaccacctgggaccccagagccctgcagccgcgggtggggccggcctgcagcccctggccagcccaagccacatcaccacggctaacttgccaccgctgccccggcccctgggcttcgagaggacgcccggcgtgctgctccccggggctgggggcgcagcggggtttgggatgacgtccccacccccgcccaccagcccttccaggactgccgtgcccccaggcctttccagcctcccactcacgtctgtggggaacacgggaatgaagaaggttcccaagaagttagaggagattcccccagcctctccggagatggcacagatgaggaagcagtgcctggactatcatcaccaggagatgcaggctctgaaggaggtcttcaaggagtatttgattgaactgtttttcttgcaacactttcaagggaacatgatggatttcttagctttcaaggagagactgtatggaccattacaagcatatcttaggcagaatgatttggacattgaagaagaggaagaggagcactttgaagtcattaatgatgaggtaaaggttgtggccagaaagcacgggcagcctgggactcctgttgccatagcaacccagctaccgccgaggacttctgcggcttttccagcccagcagcagccgctccagcccctggcacccaccactgtactgtctgtctctgcggattggaatgcacttctccagcgacctaacaaatacatatggggactccagtacctggagatgtgaattccataaaaatggaagcatctaagaggcagtgaacactggcgcccacagattctcctttgatgtcagaggcctcacctacaagtgggccatcctgggatgggtttacagcacctggaggtgacatcaggtgttcctctccagcagttaatgccaacagcacaaagcatctgtgtgccgaagaacctggcaggtactagtccaggagtaggctgtgggagccgggagccaacagctctgaagctctgagctctgaggctttgaagctaccgcacactctgtcatctgttgattgttcctgggcagagtgggcccttgcatctgtttattgacccagacctgggcacaggctggtggtgtctgtgcagactcacagtttcccctacaggtgattaaaaaccaaactatcaag

SEQ ID NO: 2105 - DNA, 1598 bp, Homo sapiens
ctccacaggcgggcgttaaaccgcgcgggcagcgctgcgagagctcccaaagatgactcgagtggtgagccccgaggcggcgcgtttccccgccgcgccagacagggagagagggcctagatgtgccggcgccggttggtcagaggcggtggcctctgacctttccgagagctgagaaggcggcgggaggaaaaaaggcagacacacgctgggcgcccggccgctgacggcgggtaatgctcggacaacgtgccggcgacggggagcgcccgggcctcccgggcgacggcgaaggcggagtcccggcccggccagggaggcgcgcggagaggcccccccagcggccagccaaggtaaacaaggccgtgacgtgcgccgcgcacttaccgggagctgcggcctcgcggccgctgagcccgaacaagccagaccgggtcaggccgggccagagggaccggattggggcgaagcggcagcggaggcggcgggccgacgccggtcaagcccgcgctgcttcctccagaagagtcgtccccacagctccggaagtgcttggcgccgttgcgtcacttccggatcggggtcgacccacggtcgctcgggtcgcgacaggctcccggctagagggcctgtttagcgccgcctccttgaaacttagcgctctgacccagagtctgaccagggtacggcaggcgccgaccgcgtctggagccactattcgcctaccagcgtctcccgtcgagatgtttttaaccagcgcgtttctcaccggcttctcatttcactgtttgtactccgggatcgggcacggagaagacatcctggcgtcagtggagcagataaccattgtttctcggccgctatctggtcagaggggagctgggccgggaaattctgcctacaccccgaggcggtcgcagggtggccccagagccgcaaccacaccaggctttcgcttcccctgccgaggtctcgttcgccgcgcagttctccgacttacggtcaccgtgcaagattgcatcttaactgccttgcttgcagtttcttttcacagtataggagttgtcatcatgacttccagttaccttctgggaccggttgtcaaatgatgtggctagagacggaggctcactcagattgttgctgcaccacaatggaaatgccagtatgaagccgctgatgttaggaaggctccaggttgtgcaattccatagacaacaaatcaaatcatttccaaccatactggagtcgcgtatatacatattcaagacacctgtgcaggccgggcgcggtggctcaagcctgtaatcccagcactttgggaggccgaggcgagtggatcacgaggtcaggagatcgagaccatcctggctaacacggtgaaaccccgtctgtactaaaagtacaaaaaaattagccggacgtggtggcgggcgcctgtagtcccagctactcgggaggctgaggcaggagaatggcgtgaacccgggaggcggagcttgcagtgagtcgagatggcgccactgcactccagcctgggcgacagagcgagactctgtctcaaaataaaataaaataaaataaaaaataaaacaaat

SEQ ID NO: 2106 - DNA, 1616 bp, Homo sapiens
tactttacaaacctctccctatctccagttgtggcagccgaaaatgtctccagacattgccaaatccctcctgtgaggcaaagtcgtcccagtggaaaaccagtagcctgtagacatggggtagaaaaatcaggcccagttttagatatcagcagaagcagaaatatagtttcctcagttttgataaagctgtgaacttgtattctgagtgcccttgtgaaaggatgccgttgtttggagattgactgctgggatggagcacaaaatgaacctgttgtatatcatggctacacactcacaagcaaacttctgtttaaaactgttatccaagctatacacaagtatgcattcatgaaaatcactgctccactgcccaacaagaagtaatggcagacaatttgcaggctacttttggagagtccttgctttctgatatgcttgatgattttcctgatactctaccatcaccagaggcactaaaattcaaaatattagttaaaaataagaaaataggaaccttaaaggaaacccatgaaagaaaaggttctgataagcgtggtaaggtggaggaatgggaagaagaagtggcagatggagaggaggaggaggaggaggaggaggaggaggaggaggaggaggaggataaattcaaagaatcagaagtattggaatctgttttaggagacaatcaagacaaggaaacaggggtaaaaaagttacctggagtaatgcttttcaagaaaaagaagaccaggaagctaaaaattgctctggccttatctgatcttgtcatttatacgaaagctgagaaattcaaaagctttcaacattcaagattatatcagcaatttaatgaaaataattctattggggagacacaagcccgaaaactttcaaaattgcgagtccatgagtttatttttcacaccaggaagttcattaccagaatatatcccaaagcaacaagagcagactcttctaattttaatccccaagaattttggaatataggttgtcaaatggtggctttaaatttccagacccctggtctgcccatggatctgcaaaatgggaaatttttggataatggtggttctggatatattttgaaaccacatttcttaagagagagtaaatcatactttaacccaagtaacataaaagagggtatgccaattacacttacaataaggctcatcagtggtatccagttgcctcttactcattcatcatctaacaaaggtgattcattagtaattatagaagtttttggtgttccaaatgatcaaatgaagcagcagactcgtgtaattaaaaaaaatgcttttagtccaagatggaatgaaacattcacatttattattcatgtcccagaattggcattgatacgttttgttgttgaaggtcaaggtttaatagcaggaaatgaatttcttgggcaatatactttgccacttctatgcatgaacaaaggttatcgtcgtattcctctgttttccagaatgggtgagagccttgagcctgcttcactgtttgtttatgtttggtacgtcagataacagctaatgataaatgacatatcattagctatgcatcgcaataaaacagccaaaatg

SEQ ID NO: 2107 - DNA, 1798 bp, Homo sapiens
cttttccaactgcctgtcggaagccgctgtaaaacgtcgtgaggagcgccgctgctttacggctgcctctcccagactagagccccggagcgcccaccgccgtcagccgcgtcttcaagctagtcggccccgcggagagcgagagaccctgcgcaccgcagccctctccgctgcgcccattcctgccgccggcgatgtaactcggggaggcagcggtgcccgctggcccggggttgagacaggcggcaggtgcctgtgaggcgggcgggtgccgggggccagcaggatggaggaaagcatggaagaggaggaggggggcagctacgaggcgatgatggacgaccagaaccacaacaactgggaggctgcggtggacggcttccggcagcccctgccacctccgccgcccccctcgtcgatcccggcccctgcccgagagcctccgggggggcagctgctggcggtgcccgtggtctccgtggacaggaaaggccccaaggaggggctcccgatggggccgcacccaccgccagctccaccatcaacatcaacacctccacctccaagttcttaatgaatgttataactattgaagattataagagcacatactggccaaaattggatggtgccatagatcaacttttaactcagagtcctggtgactatatccccatatcctatgaacagatatacagttgtgtgtataaatgtgtatgccagcagcactcggaacagatgtatagtgatctgattaaaaagataactaatcacttagagagagtctcaaaggagctgcaggccagccctccagatctctatattgaaagatttaatatagctcttggacaatatatgggagcattgcagagcattgtgcctcttttcatatatatgaataagttttacatcgaaaccaagcttaacagagacttaaaagatgaccttataaagctgtttacggaacatgttgcagaaaagcacatttacagcctaatgcctttacttttagaagcccagtcaacaccatttcaggtcacaccttcaactatggcaaatattgtgaaaggcctgtataccctcagaccagagtgggttcagatggctccaactctattttctaaatttattccaaacattctccctccggcggtggaatctgaactttctgaatatgctgctcaagatcagaaatttcaaagagaacttatacagaatggttttacaaggggtgaccagtcccggaagagagctggggatgagttggcttataatagctcgtcagcatgtgcaagttccagggggtacagatagtgaatgtattgaatatgctttccttcctgaaaagaggacacactggagctgcagagactgtattcagagcacagtgggggctgcacacactcaggagctctgtcacaaagctgttcatggaagaggatgttggacttcttacttgctttcacttgacagggccactgggcaaggaactgagggtggcatccagccaacagctaccaaggaactgaggccttcaatctaatagcccgaggggctgtaaatcctgctgacggtccgagtgaacttggaatggatgttggtccagttgaatcttgagatgactgtggccctggctgacaccttgatcacagcctagcggcaaagcctgagacagagaattcagctaagctgtgcccagactcctgacccagggaaactctggaataaccgtgtgctggtttaagccactaaattttgtgagtaatttgttacacaacaatacaactattacaagatg

SEQ ID NO: 2108 - DNA, 2333 bp, Homo sapiens
aaaaacagctttaacctggatgtggaggaggatgacattgagaatctcttagaggattgacttctaaagagtcatgttggccgggcgcgggggctcatacctgtaatcccggcactttgggaggccgagacgggcagatcacgaggtcaggagatcaagaccatcctggctaacacggtgaaaccccgtctctactacgaatacaaaaaattacctgggcgtgttggcgggcacctgtggtcccagctgctcaggaggctgaggcaggagaatggtgtgaacccgggaggcggagcttgcagtgagctgagatcgggccacggcactccagcctgggtgacagagtgagactccgtctcaaaaaaaaacaaaaaaagtcatgttatgtgaaggagaagcccagaagaggaaagcagaggagtcaggcatgccacttactcagggacacttgacattcagggacgtggccatagaattctctcaggaggagtggaaatgcctggaccctgtgcagaaggctttatacagggatgtgatgttggagaactacaggaacctggtctccctgggaatctgtcttcctgacctgagtattatctccatgatgaagcaaaggacagagccctggactgtggagaatgaaatgaaagtagcaaaaaatccagataggtgggaaggtatcaaagatatcaacacagggaggagctgtgcagtgagaagcaaagcaggaaacaagcctattacaaatcaacttggattaacctttcagttacctctgccagaactggagatatttcaaggtgaagggaagatttatgaatgtaatcaagttcaaaagttcatcagccacagttcttcagtttcgccacttcaaagaatttactctggggtcaaaacccacatatttaataaacataggaatgattttgttgattttccattgctgtcacaagaacagaaagcacacattaggagaaaaccttacgaatgtaatgagcagggcaaagtcttcagagtgtcttcaagccttcctaatcatcaagtaatccacactgcagataaacctaacagatgtcatgaatgtggtaaaaccgtcagggacaagtcaggcctcgcagaacattggagaattcgtacaggagagaaaccttacaaatgtaaagagtgtagcaagctcttcaatcgaattgcataccttgcacgacacgagaaagtgcacactggagagagtccttacaaatgtaatgagtgtggcaaggtcttcagtcgaattacataccttgtacgacatcagaaaattcatactagagagaaacctcataaatgtaacaaatgtggcaaggtttatagtagcagttcatacctagcacaacattggagaattcatacaggagagaaactttacaaatgtaataaatgtggcaaagaatttagtgggcattcaagcctcaccacccatctgttaatccacactggagagaaaccttacaaatgtaaagaatgtggcaaagcttttaggcacaagttctccctgacagttcatcagagaaatcataatggagagaaaccttataaatgtcatgaatgtggcaaagtcttcactcaagtttcacatcttgcacgacatcagaaaattcacactggagagaaaccttacaaatgtaatgagtgtggcaaagtcttcactcagaattcacaccttgcaaatcatcagagaatccacactggagagaaaccttacaaatgccatgtgtgtggcctttcactgtggtctgggaaagaatcagtaagatgacagggctgacttcattagatgaggagcgtttctatccagtttcctggaggaataaggacactgccttttcagattaaagattgtctgatttagagaccatggaggtggacagggaataacaaaaccgtgatggcagtcatcatgcttattgcagttagcacacacttttcctgacaggcacagtgctgctgtgctctacaaatgaccatgaaatagagcacgccatgactttaggacacagggatttttatgggaagagagttcatcagggactgattacgtaggagagacgatgcaggggaaatggtggccaccgtctccattgaatagcaatagctgctgtttagcaaagactgattaaaaagtactctgatttttcaaatggaagagagaacagttaaatcagagtagagagtttaatcaaaactaccagtggaacatgttcttgagtaggattcacatttaactgctggcataatttgcaactgttggattttctcatgtttggaacaataaagttgaaattttccaaagtgtg

SEQ ID NO: 2109 - DNA, 2419 bp, Homo sapiens
aaacagttcggcaaggaggccgggcccctgtcccgcctctgagggcggaggactcggcctgcaccggacccaagcgaggggcagtctggcctctgctggcagaagcagcgcttccaagtattttcatatggtgactttgcagagctgcgcggtccagacgagggtttcaggctgcaaagcgggaaagtcttgggggccgctctgcgctccaagacagacgcccacaatctcttctacgtcgtgcaacattcaagcaggcggcctccttcccgcgctttcgcgcccacaggctgggccaatcacagtgccgcacttttcatactgcccgacaggcggtgggcgggccgctggtgactgttacccaacaggcgccgcggctgctccggtggcgccactgactcggaggcggctgcggagagcggggcgctggcccgtggaggcggcagcggcggcggctttctagcggatccgagattatatatctttgaatgatgcaggccactgcagtggtggagacagcatctggtaaaggctaccacagtaatggaggcaacctccaaaaagataaaccttcaaatccaaagaaagaaaatttgttattatcctccaatggttgtgatgaagtcaaattgacttttcctgatgatgactggaattcttcgacactagagcaaagagctaataataaagaaatcagcaatattgacaaaatggatttattagagccatttttttcagtgagtcaagatactaacacagagagtactcagtttcagtcaagtgaacttgaagacagtactgactatgctttcttgaataaaacatattctataccttattcagagtcaaaactaaagaaggaaagtcttactcctttaagttcagaattagatcctgaagtgcagaaaaaagaggaggttttttttaatattttggaacatcaagataagactgttggcttggaaagaatctacaatatttcagatgctaattatagagaaagtgctgaagatacacaaaagcatgatacagatgaagactcacagcaggaatatcacagtgcagaagaacaagaatacataagtaaccatttatcttttgaccaaacaaaagcattagatatatctaatccagaagttgttgaattaggaaattcgggttatgaagttagatgtgctagcaatgtagaagataatcgtgttaactcgggaagtggttctatcatctctttcgattcacttgatgtttatggacaagaagagtcacttcatgtctccaaatttcagaattctgttatgttaagagaatatcatgacctaaagcatgaaaagtataaggaacaagagactaattcaatgtaccacactgtatttgatggcagtgtactaagaagcaattctccaggaaaccaggaatctcaatctaagagtggttccttgagccctcaaaaagtattaaaaatgaaaatttatactgaaaacatgaaatctcaaataaatgaaggtaaagatttttgtggaaataaaattgttgagaacaaaatattactgcaccttgaaaatcctagcacattaccacaggataaagctttagagacattactccaaccctgtaaagattgtcaaacttcctggacctctgtttttgatgattcgataatttctgcctgtggatattatgaaagcctacaaaacactgctgactcagccttagatttttctgctatgctaccaaagatcgcagtcagagataatcaggcaatagaagataatacgtccctaaaagttgctcatagcagtaccacaaagaaaacatgctttcacaatataggagaaatgtgtactaaatcattgacagatgcagcaagttgtacagtcacaattaatcagacagtggacgttagcactgattttagggcttgtttcacaaccagcagggcaacaagtgcaagaccttctgtagtatctacatcaagcaacacagagataacaatgatgaataaaaaacgacctgatgaatggcaaaatgagaaacaaaaaagtgtggcttgtagtacagattggtcatacagtgaagattgtatagatacacagatggctataacaaaaggatcaggaaaatctctctccgttgacagtttaaaacctaatggaaattttctaaataaggatttcctggaattaagaaaagcatgtggtatcacagacctaaagaaacatcctgagagggaatttcaactttttaaagatacagagaaggatttgccatcaatgtgctgtcagaagataatgcagagagccataaaagcagagctgcaccttttaaatgttcactatcagatgtgtcgtcgccattgttgtgatatttacaaacttgtcatggaaaatagggaaggattaaatatgtgtttattaatttc

SEQ ID NO: 2110 - DNA, 2596 bp, Homo sapiens
agcaacaatgaccaagccctaggcctgactcagtgcatgctgggatgtgtgtcctggttcacctgttttgcctgctccctgagaactcaggcccagcaggttctgtttaacacgtgcagatgcaagctgctgtgccagaagctcatggagaagacaggcattctgctcctctgtgctttcggattctggatgtcttctattcacttaccatcgaaaatgaaagtctggcaggatgacagcataaatggttcactgcagtgcctggcctcttttttgtttcactgagccctgtctcgtcctgcatgaccaccatgctctgtgactccagctttggaatatatttggtatgtaccagcaccccctctttcttcctgtttcaaaacctccttggccattctcatccactttcttttccaggcaaacttgagaatcagcttgtcaacttgcatttttaaaatgctgctgaattggcactggttttatgcatgacgaacaaatctcttggccatgtcagctcttctcaaaacatagattcttctcccatttcttatggttttccttcaacgtccttcagtcagatggagcctcaatctgtcgcccaggctggatgcagtggtgtgatctcttctcactgcaacctctgcctcctgggttccagcaatcctcccacctcagcctcccaagtagctgggattataagcatgcaccaacacgcctggctaatttttgtattttttagtggagacagggtttcaccatgttagccaggctggtctggaattcctgacctcaagtgatctgcctgcctcagcctcccaaagtgctgggattacaggcgtgagccactgctcccagctgttaaggagtgtttccatattaaattatattatggggtagaaggccaaaatcaggctaatctacgtaaaagaatcagagccttctgctgcactcttttgggctatgtctccagtgggctcccagctagctgccttcagagagactgagatcagacccacactgaccacccttctcatcaccctccaaatacctctccctcgccctcatgagctgggggccctcagccagtatctgaggcaccgagtccaggttctgccttcgttgtccacaccaggcaaagctagctcattccccccttcccgagaccagaggtcgctacaggatctggtgatcacaagagccctgccacatgcaggctgctgggctgcaggacatgagcactccggcactgccagggggaagctgggtaagtgacacctcagctcgaccacctcccagctatgtgaccgctcaccagtccctatccctcgcagggccttggttcatgcaggaaggactagaccaacgcctcgccttccattcaggtgtggatgcctgagtggcctgctgggcactgtgtggggtcctgaagccggtggagctagctcagaggtcggccgtggggctcaggcaggcagggcagtgctatcgaccacaaccccaccgggaagtccaggtcagagctgaccatcagtgctgggcaccaggaggtcacactggagcttgggagctcataggctgaggtctgacacctgggctggtgagggaggaagcatcagagcagatctccctccaccagcaacccttcatccttcagagagaatgtgcccgaatccccaagccctggcctcacttacaggaacgttcctcatggaaggtgaggacccggtgagggaggcacagcagagagaaagggcatctctgaggctctccccaagagggactgccttggaacagcctgggacaggaatccagcactcagccctggtcgcttgctgtgtggctgagggcaagtctcaacttctctgagcctccgtttccatcaatgtgaccagacgccatgggagcaaggagggagtgagctctggccctgctaggtttggagccagtccctggatccacagggaaagagggacagaaagagaggcagcctcctgggaacaacagcaataagaaaggacttcctgagcaactgtgactgtggagcctgccagctgcctaacctctgctccccaggaagtctgggttgtgcctgcagccattctgctcatctcttcatgtccacagagacagtgagtttgcatccatcaaccacaaacatggctctgaggatgagatcctgcaagggggattgggggtgaggcaaagaggagctcccaggtgtttggagctgaaaaggccaaaggaatcgtgaccaactcagcattccactggctatatgatcaaacagcaaactgtttatcgtgaatgcaggatgtgggcaaactcacgactgcgcctactgccagaaggtttgctgagggccctggcaccgtgctcattgaggttatctactgggacatctagaacctattgtttgaagaatgcagtcttgcaagcctgctgtaaattaagcccctgatcgacaaccacccccacttctccctatctcctttacccaatcaaatgcgaagggctgtaaagctaagagcccttgttcactagaagcaaggagccccctgaccccttcttccaaatacactcttttgtctttatcttt

SEQ ID NO: 2111 - DNA, 2026 bp, Homo sapiens
gttagctgggatttgggttaaaaatcatggaaacccaattattagacggaatcatattcgtcatggacgtgatgttggtgtgttcacatttgatcatggcatgggttactttgaaagttgcaatatacacagaaataggatagcaggctttgaagtaaaagcctatgctaaccctacagtggttcgatgtgaaattcaccatgggcagactggaggaatatatgtccatgaaaaaggaagaggacaattcatagagaataaaatctatgcaaacaactttgcaggtgtatggattacctcaaatagtgacccaacaataaggggaaattctatatttaatggaaatcaaggaggagtttacatctttggtgatggacgaggccttattgaaggaaatgacattcatgcatgaaaagggacaaggagtaatagaagagaatgaagtttatagtaacactctagctggagtctgggtgacaactggcagcactccagtactgagaagaaaccggatacacagtggcaagcaggttggtgtttatttttatgacaatggacatggagtgctagaagacaatgatatctataatcatatgtattcaggggttcagataaggactggaagcaaccccaaaattagacgcaacaaaatctggggaggacagaatggtggaattctagtttataattctggtctaggctgtatagaagacaatgaaatatttgacaatgcaatggctggagtctggattaagacagatagtaatcctacactaagaagaaataaaatccatgatggaagagatggtggcatctgtatatttaatgggggtcgaggtctccttgaagaaaatgatattttcaggaatgctcaagcaggtgttctcatcagcactaatagtcatccaatcttaaggaaaaacagaatatttgatggatttgccgcaggtattgaaattacaaatcacgcaactgcaacactagaaggcaatcagatttttaacaaccggtttggaggcttatttttagcatctggtgttaatgtgacaatgaaagataacaaaataatgaacaatcaagatgccatagaaaaggctgttagtagaggccaatgtttatataaaatatcaagttataccagctatcccatgcatgatttctacagatgtcatacttgtaacaccacagatcgaaatgccatatgtgtgaactgcattaagaagtgccatcagggacatgatgtagagtttattagacatgataggtttttctgtgactgtggtgctggaacactgtctaatccttgtacattagctggtgagcctacacatgatacagatacactatatgactctgctccacctatagaatctaatacattgcagcacaactgaattccttccctaaagaaaaagtcctgccattgtaacatcataacttaaaacacttttttggaagaagatttaaaatatttgcccatgctacaggaagagactgtattaaaaatggatacacaaggtcagttgacactatgaagctcaagctaccaaaaagaaagtggcaatatattgactcaggatctcaaagctgggtgttttagcattactgtgtaaagacttgaagggacagaagtgaagaaaataagctgcaattttgtacagataccaacttctgaaaagctggtgtttttacaactagcattgaatgcagtccaatttgcagtagtaatcttcaatagacaagcagctttgttgctgcctttatggacatgggtaccaattgcttttgtaatatggtaaaaatgtgagctagcacttctgcgttccttttgattttttttttaacatgtattcagattgagaaatatgattttaatgctttaatctcatgtagtttgtttttaatttcaagcaaaatcttactgtacttgaatgtgccctgttttgttagcacacctagacttgctgtaactgtactcatgtcccagtatgtacgttctttctatgaaagagaaaacactaatctt

SEQ ID NO: 2112 - DNA, 2228 bp, Homo sapiens
atgatctgggtgagtgcgaggaggcgagagggcgagggggccagggggccgaggcgaggagcctggggcgcccggttctcccaggtgagctggggctacctgcacagggtcccggcgcaccctgcccttctcacctcgtgcccttgaccgagagaatgccacctgcgggtcgacgggcagctgcagacattcaatactgcctcaccttgtcaagatgtcaaacagctgactagtggagttgccatggcacaagttcttcatcaaattgatgcagcttggtttaacgaatcttggttaagccgaattaaagaggatgttggggacaactggagaataaaggccagtaatgtaaagaaggtccttcaaggaattatgagttattatcatgagtttttggggcagcagatttcagaagcacttatccctgatttaaaccaaataaccgaatgttcagatccagtggagcttgggaggttgctccagcttattttaggttgtgcgatcaactgtgaaaagaagcaagaacatattcaaaatataatgacactggaagagtctgttcaacatgtggtcatgactgctattcaagagttgatgagtaaagaaatattgagctctcctccaaatgatgctgttggagaattggagcaacagcttaaaagagccttggaagaacttcaggaagcactagcagaaaaagaagagctgaggcaaagatgtgaagaattggatatgcaggtgactacacttcaagatgaaaagaattcactggtttctgaaaatgagatgatgaatgaaaaacttgaccagttggatggctcttttgatgatccaaacacagtggttgcaaaatagtattttcatgcacaattacaactagaacaattacaggaagaaaacttcaggcttgaagctgcaaaagatgattaccgtgttcactgtgaagaacttgaaaagcagctaatcgaattccagcataggaatgatgaattgactagtcttgcagaagaaacaagagccctgaaagacgaaatagatgttcttagggctacctctgataaagcaaataaactggagtcaacagttgagatatatcgtcagaagctacaagatctgaatgaccttcgcaagcaggtgaaaactttacaggaaaccaacatgatgtatatgcataatacagtcagcttagaagaagaattaaaaaaagcaaatgcagcacgtacacaattagaaacatacaaaaggcaggttcaagatcttcatgttaaactttcctccgaatccaagagggcagacacactagcgtttgaaatgaagcggcttgaagaaaaacatgaagctttacttaaggaaaaagagagactaattgagcagcgtgatactttgaaagaaacaaatgaagagcttcgatgttcacaagtacaacaggaccacctaaaccaaacagatgcatctgctacaaaaagttatgagaatcttgctgctgagattatgccagtggaatatagggaggtgtttattcgactgcaacatgaaaataagatgcttcgcttacagcaagaaggctctgagaatgaacgtattgaggaacttcaggggcagctagaacagaaacaccgtaaaatgaatgaactggaaactgagcagaggctgagcaaagagcgtattagagaattgcagcagcagattgaggacctccagaaatctttacaggaacaaggttccaagtctgaaggcgaaagttacaaaagatcaatgaacttgaagctgctcttcagaagaaagatgaagatatgaaagcaatggaggaaagatataaaatgtacttggagaaagccagaaatgtaataaaaactttggatcccaagttaaatccagcatcagctgaaataatgctactaagaaagcagttggcagagaaagagagaagaattgagattctggagagtgaatgcaaagtagcaaaattccgtgattatgaagaaaaactcattgtttctgcgtggtataataagagtctagcattccagaaactggggatggaatctagacttgtgagcggcggtggtgcctgcagtgacactggtgcgtgcactcctgcgcggtctttcttagcgcagcaacggcacatcaccaacaccagaagaaatctctctgttaaagtccctgctacaacatctgattaaactgcaaaaaaaacaaaacaaaacaaaaaaaccacataaaat

SEQ ID NO: 2113 - DNA, 2006 bp, Homo sapiens
aaaaaacgacctgcccagaccctcagcgtcgacgctgcgcacaagcgcagtcaactgctggacccggccggtgtgaagtttcacacccaaaaggatgaagggcacccacctggcttaagagaacgactcccagaaaattagccgggcgtggtggcgtgcacctgtaatctcagctactcgggaggctgaggcaggaaaatcgcttgcacccaggaggtggaggttgcagtgagccgagatcgcgccattacacttcagcctgggcaacaagagcaaaaaactccgtcaaaaaaaaaaaaaagaagaagaagttgtggagctgtctgattcctgatcctgtccgttcaggctggggccgccctggtctttcaaacccagcagtgagcttggacagacccagaggtgtttactccagatcatgtctactgtgaaggaagcagcacaccggctgtccaaaagtgagatgagcctctatgcagtgctggatcttaagaagggcgcctcacctgaagacttcaaaaaatcctacagccattccgcattgcttccccaccctccttttgagtatcacctgggtaggaaactggccttgcggtatcatcccgacaagaatccagggaatgctcaagcagcagaaatattcaaagagatcaacgcagctcatgccatactgagcgactctaagaagcggaaaatttacgaccagcatggctcattgggaatatatctgtatgatcactttggtgaagaaggcgtcagatactattttattctgaatagttgttggttcaagacacttgtcatcctgtgtactctgctcacttgttgctgtttttgttgttgctgctgtttttgctgtggagcacttaaaccaccacctgagcaggatagtgggagaaaatatcagcagaatgtccagagtcagcctccaaggtcaggagccaaatgtgattttagaagcgaggaaaatagcgaagatgatttttaagagatgaagaaggatgaggtgctgacccagtgagggtgccttctgctgcccagtcccctggacacattgaagagaggagcaagtagccctgtcctgacattgaccctgatttgacccctcttcttataaggatctcaagaatctcttcagaagcactgatgacgttgatcccagtaaggacatcacctctacccttggtaccacaactctgtatggggttgcccagctactcttcctttcagttgcagtcccaattttactccgtcagaaagcagccctcccctccctccccttatgaggtctcaggcagtggtggcagatttttcctgaagagtctttttcctgtgtctgccttgttattggaaccaatgccagctggtaggatccctgagccccttgcgatatcaccaccaagagcctgataactgagcagggtggatcctgtccctggagctgctgcacccattaattctcccttgttgcaactctgtgtaccaagaacccctagcatcagcctcattcctaagccaataacgcctgtatggagttggtttcatcttctggtgcccacggccattggcattgccagcctcattccatgccactatgagtcaactcaggaaaactgcgagtgcatttgaggcttaggggtagtcattccatctttagattatccttggacttcagctaccagcacagcgtgcattagccttggtcctgtaggttaactgaagttcaaacatcagtgccagcttgcctccatccttttcacatattatgcaggccaattgacatataatttgttcttaaaaataggggcatgaaatatgtgatctggaaaagattgtactttctggactcttttcccactcttgcctctttgtgctgctgtttcgtatcctcctcacaccgtgtatttcccacccactcagggtcacagcctactaattcctcaaacttctctccctggactaggagaaaggctaaagaatgtcagtaaataaaagagctttcatcc

SEQ ID NO: 2114 - DNA, 1965 bp, Homo sapiens
attttgcataacctcggtaaggggaagtctcagttccaggctcttctaggctatgttctctgtctccacaccttcctctcagacagcagctggagccccagaacctgggagcctcacagagaaagtcctgatgtgggacctggttttccacccgagacccagaatccaataaagaagtgtttccataaatgatgcatcctcccaagtatctgggattacaggcgtgtgccaccacgcctggctaattcttttgtattttcagtagagatggggtttcacccatcaggctggtctcgaacttttgatgacctcagatgatccacccaccttggcctcccaaagtgctgggattacaggcatgagccatcgtgcccagcctctcagctcctaattcttatgttcatcaatcagtctcttgctggggttcccctaggaggtggtgaaatgaccccagctcgctgttcctcacatgggtgctgccacgtcactggctcaggctcagctgctgggtcaccaggagaatggacccttcctccacctcagctcagagcacagtgatgattcgtgactttcccaatagaacttcaaatctctgaggacggggggtggggggatgtgcttgagtgtttgtactcatggtcttgttctcggagtgacaaagctggaacacaatacctctatgcatgaaaaggttgtcacttgtcacaactaacaggctttcacctcaaggaaattttcttcccttgtgtacttttcccctggcagtggacatggctgcactcttccaagaagcaagcagctgtcccgtctgctcagactatctggaaaaaccaatgtccctggagtgtggatgcaccgtctgcctcaagtgcatcaattcgctgcagaaggagccccatggggaggatctgctttgctgttgctgttccatggtctctcagaggaacaaaatcaggcccaatcggcagctagagaggctggtttcccacatcaaggaactggagcccaagctgaagaagattctacagatgaacccaaggatgcggaagttccaagtggatatgaccttggatgccgacacagccaacaacttcctcctcatttctgacgacctcaggagcgtccgaagtgggctcatcacacagaatcggcaagaccttgccgagagatttgacgtgtccgtttgcatcctgggctcccctcgctttacctgtggccgccactactgggaggtggacgtgggaacaagcacagaatgggacctgggagtctgcagagaatctgttcactgcaaagggaagatccagctgaccacagagcttggattctggactgtgagtttgagggatggaagccgcctctctgccagcacggtgccgctgactttcctcttagtagaccgcaagttacagcgagtggggatttttctggatatgggcatgcagaacgtttccttttttgatgctgaaagtggttcccatgtctatacattcaggagcgtctctgctgaggagccactgcgcccatttttggctccttcaattccacctaatggtgatcagggtgtcttgagcatctgtcctttgatgaactcaggcactactgatgctccagtccgtcctggggaggccaaataagccgccactgcaaaaaaaaacagggtcagaaaattacttgggtgggtagacttaggaattttctacttggtagaagcattatacagtcataggagaaagatatgggacatttctataatctatatcctaatttgattcgattattgagtcgtaagtattaattattgccaccatccaactcattgagtcttatggttcacatcttgtttcctatagaaatgttctgtattctcggatcaatttccaaatgctttactttttcatttctgtaagttcaaatcaatgtttaaattatagaagttatgaggtaaataaacatttggatatc

SEQ ID NO: 2115 - DNA, 1860 bp, Homo sapiens
ctgagaccggagtctcgctctgtcgcccaggctggagtgcagtggcgcgatctcggctcactgtaaactccgcctcccgggttcacgccattcggctgcctcaccctccacagtagctgggactacaagcgcccgccaccacgcccggctaatttgcaatacggaaattttaatagctgacgtgaaaaggggttgtctccataaaggatgcgggccttcaggggcagcattattctgcaggtctcctgcttcctgatggcacaaggactccacatcacccagtcctaccttaaatccaatcggacaccagtccacaaactggttggtgtgcttgctcttgatggtggcgacagccgcactgacatctttcaggaccacatcccctctgtacaacatgcagcaggccatgtacttgccatggtgagggtcacacttgaccatctgattggctggctcgaagcgggcactggcgatcttggccacggacagctgctcatggtaggccttcttggctgagatgaccaggacgtaggtggccagggggaggtggatgtgggggtatggcaccaagttggtttggaattctgtcaagtacacattcagggccccatcaaatcacagggaggccgtgatggaggacacgatctgcccagacgactgaggttggtgtacgtgggacactcgatgtccaggttgtgctgacatgtcataggtggctttgctgtcgactatgaaggcacagtcagaatgttccagggtcgtgtaggtggtcaggatggagttgtagggctccgtcatggccatggagacctggggggctgggcaaatggcaaactccagcttggacttcttcccgtagtccaccgagagccgcttcatgagcagagacacgaacccagagccagtgccgcccccaaagctgtggaagatgaggaagccctgcagtcccatgcacagatctgcccgagagaaaccagacaacgtaagccaatgcccgtgggagccacaccaccaacctccaccaagccggggccacttctctttgcctctgagagttgatacggattcagaccatccataatgaacacgcatcacactttgaagcagagaaaagcagacaatacagatctatgcacaaatcaccacgcacacttcacagtaagacgttgcagaggtctaggaaggctggtttgaagaaatacacagaagaaaaacggatggactaaccagagcgctcagccagcctgctggactggcacccgtggctacagacactcttgtttagcaccatggagagctccctgcacagaagcaaggactcagggcattgccccctctctacctgagaactagactcagcgcccagcactggatttgataatacaggtactcaaatacatgtgctttcctctttactcagacacttctagggctggcagggtcagacagtaatcccccactttgtggggaggccctgtttttgctgaacagctcaagggcaggaagattctttcttccacacacccctgcaactgccaatacttgttctgtgtgacccttgcagccatcctatgcggtaggtgctaccattgccatggatcaagtggggacgcacagatccaagctccttcacctctcaagggagttgggccctcccacagatctcttggaggaaaaaaatggccttgctgggcctgtcgatttccagtccccacccacctccctcatgtacatgtgtctgtttgtgaaaccttcatagcaccttagcttccaggccctccatcccggctgcctctctggcacttgcccttttactgtgcgggtccaaagagacacctatgttcagtttgtcaaagtctg

SEQ ID NO: 2116 - DNA, 2586 bp, Homo sapiens
aaaaacggagacttattagggaacaaattactagtggcagggtggtggtgtcctggtgtcctgcttagaatgtgaagagagtgccccatcattggcctatgctgtgcatctgggaggtggtaggccacagtcctgaactgcacaactggtagtgaaattcagagcagaatgcaacatttatttaatggggcctcacagttggccagtgtccctgtggcctttccccttcttccttccactctgtgtcatggagacccgacttgatttggcaagagaacaacgtacacctaagatttcccgaatatttcccagcaaggaccctggctggctatgtttctacttcagtggtgaccacagcagatactggcagttttctgttatggctctggggtcttttaaggagcaggaacgtggaatatgtacaaacctggagccacagtcaagtactaagctccttgaagcacaaggcatgagaatatcatgttttcttttccttagaggatttatgaattaaaactaaggaataatttgtaatcagaataacaccacctggcagggatgttgatgagctgaggaaggcttatttggagatttctggtattttccagctctgagactccagacctaatatccatgtaatggccattaatgtcttgtaatttataacagttttatcagtgatccattacattaatcatcatgagttggtgacttatcaagtcctacaggttatttgttatttgtataactatatagagctatttaatttacaaacacaatactcttttgaggtagataccagaaccattttacatttgaggatattgaagctaggaaaaagactcagctcttgaaggaatggacatggggtgcccttgccttccttggggagagagccacctaatctgtgcagctgtagttagggcctgccaccttattcctcctctccatccagcccctacattttggaaacaaaaaggcagcagtgatctgggaattatttaatgcttagtttgacaggacaaattttaaggaccttaagagcaaccttttatttcttaccatatgaggcactgggacaggcacagagaagtcaatattatttgcccagtgcatttcttcatggcttctgctttttaatcttaggctcacttttttaacctcattgctcacatgttatgattccttccagaaagttcactgaaattctaatgtcccttgctgttccttaggtaacttaggagtaactttccagctcttcccctaactagttgtgtgacgtgcagcgggctgcttaacttctgtgtgtctcagttttctcaactgtaaaatgaatgatccaacccttgtgtcagaaggatgggtgaggctcatgaggaataacacataagaaatatgggatgcttaccacagtgtttggtaaataacatgagtttcctcttccctctttgaacagtcctttgtattctgctgagagctttcctgttcatgctgcctcacaaccaaaaggggaaagaatcctgagtcctgtgctcatgatttctccctttgctagctggttcaaggccaatccagataccatggtattttctgaaagagtcccacccttctgtgcaaaagccttcctcccagggagacttgatatgactgattaacaatccaattaacactctggaacaatctagaagggctgtggctcattaccctcagcaattttccacccatttagtctccaagccattccctggaagagacaagtggatctgatgagtggggctgtgccatgagacctccagtatttatggagaagccagtcctttcttccttcgccaggcctcaagatttcccaatgtgcctctattcttacatggcggatgggattctttgccttcatacaggaaggaactggaacctcaaggcagacaggacaaatacaaatcttgaaaatgaccatgactcctagttggtccctacttgcctcctggtttcactaagtagagggtcactccaggtagagccctatccagcacactgctccttcccccacctttagatgtggacagtgggtggactgggcccatagcctggacctggacagctgtgtcctcccaaccagactcttctgattctgctgcgcctcactctttcctacttatccttgcctagatccctcttactccatctttcctgctcaggtcacaatggacaataatctctgacccctgccccagctagactggcactggagagctgagagagcctcctgtccatggagaattctggcagagctgctatcttcagccccgtctcaactctccagggtcctgtgccctttgtctacctctcccaggcctgactctcctcccacttgcatggacattgtctttcctagctctgggctgccttctcagcctcatgttttgccctttttcctgctgtgggagccagccatcactgtaatgcatgagtgcggggatgtggtgtgaagggaactccagttctggggtcagaagatttaaagtttgagacctacttctgtcccataagcactataaaaactaagccaaataaacaactttgatcctc

SEQ ID NO: 2117 - DNA, 1861 bp, Homo sapiens
agctaggccccttcctcctccagtgcctgtctacctatgtttgatgcttggggctagaaagactgaccttgtagcccctcaccttctctccccaatgcactgggctggttcagcagctgaccaatgagggtcatgcttgcatactggccttgggtgagtggctcaggaacagtttgcaagaccgtgttgaagctacttgtaactagaccattttcccagcttgaccatgagcttcttcaaggcatctcttctcagtctccactgtagctctgtggggatgctaaccctggcttccaaggatctgaagaggaagctgcggctgtgactgtcccttttcggtctgtcttcatcctgcctggctcacgggtctcctgtcctcctgcatagcttgcggtggtgaggtgatggcagccatggacacaggccagagagctgacccaagcaatcctggtgacaaggaaggggaccttcaagggctgtggcaggaactctaccagctccaggctaagcagaagaagctcaagagagaagtcgagaagcacaagctttttgaagactatctgattaaggtccttgagaaaatccccgagggctgcacgggatgggaggagccggaggaggtgctggtggaggccacggtgaagcactacgggaagctcttcacagccagccaggacacgcagaagcgcctcgaggccttctgccagatgatccaggctgtccaccggagcctggagtctctggaggaggaccacagggctctcatgttgttatcgcataataaataggacttccgctgggagggatgggcactccaggtggaagagcctgccctgacaaaggcgtggcatcatgaagattcatgctgccactgggaccggggacttcgggatcccagaggaaggatgaccagccgagcctcaagatccggctgtgtcagctgcagaagaagtgctaccgcaagcaggagcagtggtggcagctgaagcacagcatcacttaccagaaggacattgactttgacacacacaccagcagcagctataatgatcagctgctcggctacatgcaaatgaccatcaccaacatggcccggcagtgctgcccctctgcccacggcgtgcccaagagcatggatctcttctccaagctcgatctgattaagggcgcttgtgagagttaaaggagaagtaggtcagcctttgatgatgctttggtacctagaaagcagcgtccagaggccaaaacactgtcagtgcagaggattaagctggtggctctcaggtttgaacacgcatcaggaggccctgtatcaatgcagagtgtggacccacctccagagcttccaggccctagaatctgcatttctaacaagtccccagatgtggcagatgctgctggtcctggggttacattttgaaaaccactgctttagagtaatggcaaatcctacatgctgaagccaggcactgctccactgtaaccaccttctacgcccagggtgaagttctgtggcttgttgactgtgccttcgagggctctatgtcattctgtcccctatcacctgcctgctgtgcacctgtcgtgcttgatctagctcagatattttgtcacactccttggggaggagcaggattggaacagttgcttggcgtggcaatggcctggccaccagtcgacatttgcagccagcatctgggtaccttgggggctcccagcctcccctgggcagggctggggccatgaattggacacggcattgcgcttaacagcgcggctacctcaggctgctggttctatattagctggagaaaaaccttcaagggcatttggagaaaaaataaaaagcactagttcaggt

SEQ ID NO: 2118 - DNA, 1774 bp, Homo sapiens
atacagattgcgccgaccgtgaatttgaagagtcccgttgtagttttgtgacgcatcatttgttcaatttaagcagtggccctgggttggggaaatatagaaggaagaagcaactaattcacaggagtcccagaagtcatcatgcaaatgacacaaagatcccatcactttctagtttggggagggggcgggcgcaaggggaaggaaggagggaagaaagacatcttccaactgttattatctagtctctgcaggcttagattggtgctctgcctacattggaggtgttctgcaaaccggagtcttcctcgccagagtcccataaacgtgcctcagtcagatgctggagagacagagaagggaagagtccatcagagcctcctgattcgagcatcacacagcaacccttctgagctcggtggtccacacagcgcagggttctatgaactcctgaggagagccaggagtgctgctaagctttcccaggtatgcgtgaccatgtgtgccttcatctgtgtgtgacttgggccagcacctgccctcctccttccttggtttatctgccccctcaatggggataacactcctagacgttgctgcctcatagagacagtgtgaccgtggaatgaacaccctttgcacagcataatcaggatcagcagtcctgaagctgcaaggctggagagagaacaggaggtgaaagaaaagggtgagttagaccacaattgggtgcagtcaagaagccacagcacgcaagagattgcctgtgatggggctccaggattccaggcctggcaacagacccccaggtttcaaaatgaaaaacgaaaagagctagagaccaagaccaagggatatgttcaaagactatgaggtccactgtctctgatttaaaaccaaaacgtttgccatttgctctagggaatcagggaagaaagatacagggtgatctgtttggccccgcccccaggcttctggacatttccaggactctaggcaaaggcagaagccaagtcaagagttccacagcaaaacaggtgtgcccaggaccggggaagtctcaggaagcccatagtacatatcagctggaacttggggggcccgggactcaaagtgccctgtgtctggcctggggggacctggggcgggcgacatgatgtgcaaacctcagacccaactctagtaacacaaagctgtcccagggaaaagcgagcagattccagtgttgtgacagctcaggctcaggacgaagacgcctgcgtgggtacaatgggtcctctgggggtgcagtagaggtctttgtgggggagggcagtgcatgggggtctggtggccccttcagctccttctagaacccttgggaaagagacactgcatgggaaaggctgagtgccatgactcacccaaccccttgtccaacatgaagtgaccaagcccttgatcagctttaaaaactagtttacggctgggcacagtggctcacgcctgtagtgtccgcactttgggaggccaatgcggaaggatcgcttgagcccaggagttcaagaacagcctgggtaacacagggagactctgtctccacaaaaaattaaaaaaattagccaggcatactgacacgtgcttgtggtcccagctactcaggaggctgaggcagaaggatctctggagcccaggagttcgaggctgcaatgagctagctatgatggcaccactgcactccagcctgggagacagagtcttgctctgtctcaaaagaataaaaatacaaactagt

SEQ ID NO: 2119 - DNA, 2146 bp, Homo sapiens
gctaatgctgtatatatggcttacgttcaggctctcctgtgcccagagagagaataaagccatgttgaaaccgtccacaattgcttaagtgtttttccagctaccgccactcgcctgactccccttggacctcagttagaacctgacatttggcgccatgaacagatcctgagatttagaagcagtggcgcccttcttgtggcaacatttggctgcatgtggttgggccatcaacaaatccaaggtccaacagcctggattatctgcgagattcctgggagttatctggtcaggttgacatgctccaactgcattgtggactgggcccacaccttcactgaggtgaccaatgtttccaactgttggatctgcaccatccttccaggagcagctgcagatggcttgccttggcacatacattcagcatctgcagagaaatggacatggctggagactttgagtcccatggccgacacctggaatgcgacagggcaagctgcagacaaagaattccgcaagacccatagcatgcctgccccatcttgcctgtagcatttatgatgggaggggctggctagtggggaaatatgtagtacccccagctcagggacggcagtgcatagaggaacactggggtaacaccactgtgggatggctaccctgcaagtcctgtgtaaacataacacatgtcaccacaccgaaggtatggtggaacatgcggccccacccaaggtcaggccctgatggattttatgacccctgggagtttatgggtcattgaggacacagggtgtccttacctaccagcagactggcctggacgttgtacctgagtttggccttacgtacctggcactgttctccctgctttgcccagatgccagaataactgggaggtgctatgctctcactttttgtgagtgcgatgaggcccctggtggttcttcaccttggaagtgactatccctggagtgggtatcataactgtaaaagcagaagttactgcttttgcagagcacaccgcttgggctctgaatcacacccgaggggccctcctcctgtcaattgatgcagttgatcagatcaggaaggtggtgttgcaaaactgaatggccttagacatagtaactgctgcccaaggaggcatctgtacccttttaggaacacaatgttgtacctttatccctgacagtcagcagaacataacagcagcccttcaaggggtctcatgggagaataagtttctagggagccttactgatgaacccctgcagagaaggaggggcatccctaggctctggcctatgctgggccccaatagttataaatagcgtaactgggatcctagtagctgttgctctctgtattgttattgtgggttatagattcagggctctgctgtatgggcacatgtctctgcccggaggacactcttggcctagggagtggagggtaaggaaaatggctgcactttagtcaggaataagctgaggcagccttccaaagcagcataactcagtgggtttggagcacaggtgcacagccctgcacattatgtaaccacaccatgtgaggtgcattaggtgatcacacacgtgcgctcatgttttgctcagaaccactattgtctgtaaaaggtatggttaccctactaaagctgtacatatggctcacccccaggctcactcatgcccagactcactcgcacttagagagagtaaagccaagtcaaaactgtctacgattccttgagtgtttctccagctacccgccactcaccccaccaactcccctcggaccccagttaaaacctgacaccacccctttccctgtaagaggagtgcattcctgcccactgccatgcagctttctatgtccccagtgggaggcccatgcatccctgtcccatcggcttttggctttgaccaaaggaacaaaagcagacatgacagaggccacatccaagtagaaactctaagaggcaggacaggtgtccacagtactcctggtctttctttctgctatgaggatagcatatcccacttaggaagctgttccttcagcttaagtccctgaatgggaaactgctgcagccaaagaaagcttcagtcaatgcatagtctccctttaataaaccttgtggtag

SEQ ID NO: 2120 - DNA, 2256 bp, Homo sapiens
ctttcatgacagtaacaaatccaagattttggaaaagcgcctacgatatttaaatgaccacttcacatacaacttatattgtaatatatgccgatcactatttgagaaggacaagctgttattttcctttttattatgtgccaatcttcttctggcaaggaaagagattgaataccaggaactgatgtttcttttaactggaggagtaagtcttaaaagtgctgagaaaaatcctgatccaacttggctacaggacaaaagctgggaggaaatctgtcgggcaagtgaatttcctgccttcagaggactcaggcaacatttttgtgaacatatatatgaatggcgagaaatctatgacagtaaagagccacataatgctaaatttccagcaccaatggataagaacctaaatgaactacagaaaataataattcttcggtgtttaagacctgataagataaccccagctataacaaactatgtaactgacaaactagggaaaaagtttgtagagcctccaccatttgatttgacaaagagttacttggattcaaattgcaccattcccttaatttttgttctatctccaggagcagatcctatggccagcctgctgaaatttgcaaatgataaatctatgtctggaaataagtttcaagctatttcactgggacagggacaaggaccgattgcagcaaaaatgattaaagcagcaattgaagaaggaacttgggtgtgcctacagaattgccatcttgcagtgtcctggatgcccatgttggaaaaaatatgtgaagattttacctctgaaacctgtaactcatcctttaggctttggctgacaagctatccatcttcaaaattcccagtaacaattctacagaatggagtaaaaatgactaatgaacctcccacgggtcttcggctgaatctccttcaatcatatctcactgatccagtttctgatcctgagtttttcaagggatgccgtggaaaggaactgttatttatcaatgaatatgatacaattccatttgaagctatatcttacctgactggggagtgtaattatggaggaagagtgacagacgattgggacagacgtcttctattaaccatgctggctgacttttataatctgtacatagttgaaaaccctcattataagttttctcccagtggaaactattttgcacctcctaaaggcacttatgaggactacattgaattcattaagaaacttccatttactcaacaccctgagatatttggattacatgaaaacgttgacatctccaaggatcttcaacaaacaaaaaccctctttgagtccttgctcctcacccagggaggctccaaacagacaggagcctcaggaagtactgatcagattctgttagaaattaccaaagatatcctcaacaagctccctagtgatttcgacattgaaatggcactacggaagtatcctgtgagatatgaagaaagcatgaatactgtgttagtacaagaaatggaaagatttaacaatttaattataactatacgtaacactctacgggaccttgaaaaagctattaagggtgtggttgtgatggattctgcattggaggcactctccagtagcttacttgttggaaaggttccagaaatatgggccaaacgttcatacccaagccttaagcccctgggaagttacatcacagatttcctagcccggttgaactttttacaggactggtataattcaggaaaaccttgtgtgttttggctgtcaggtttctttttcactcaggcctttttaactggagctatgcagaattatgccagaaaatataccacccctattgatttgctaggatatgaatttgaggttatcccatctgatacatctgacacatcaccagaagatggtgtttatatccacggactgtatctcgatggcgcacgctgggaccgagaaagtggattgcttgctgaacaatatcccaaacttctgtttgacctgatgcccatcatatggataaaaccaactcaaaaatctcggattataaagtcggatgcctatgtctgtcccctctacaagacaagtgaacgtaaaggaactctttccactacgggacattctactaactttgtcattgcaatgttgttaaaaacagaccaacctactcggcactggatcaagcgcggggttgctttgctttgtcagttggatgactaaattggacaaatttataaaacatccaaaagttt

SEQ ID NO: 2121 - DNA, 2272 bp, Homo sapiens
gagagaaaaaagactgaattagcccttgccaagaattatcctggaaaaaaagtatccagtactaacaacactccagttccaaggctgacttccaacccatctagagttgatcgcttaattgtggatgaacttcgagaactagccagagttgtgactttactaggcaaaatggaacgtcttcggagttctcttcttcatgccagtatctctactgctcttgatagacacttggagtctattcacattgtacagtcacgtagaaaggatgaaattgttaatgcttccaatcggcaaaggcaaggagttcctagatgccaagatgacagagatgtttttgcccttgcttctgcaattaaagagatgtgtgtggctactcggaaaacacgcactgccctgtggtgtgcactgcagatgaccttgccaaaaacagccagtacagctgatgtgcattagtttgagagtatacttaactgtgacatacatagcagagtcccagaagaaagaactgactactaacaaattgaaacaagtacccttcaggggaccgtggatataacctgactccttcagtgacaaaaatcaagcttgtcctgttccttcttcctttgggattcatcccgaagtgagtctcgctccagttttcgggcattaaggacatcttccacattggtgtttcggaacagaactacagaaacagctccaaataatgatggactgatcaagaagctggtaccaagaagtctcaaagttatttcaacagcttcatggagtgtttagaaacttcccagcttgaacttccaagcttcctcacaggctgtgttaaagttttcccatttataagccaatcttgccagaagaggctctggaactcaaatgggttactgccagaagaatctgggacagctgcactagtgttatatttcaaccatgtacccaatctatgaactgcttccaccaaatggtcactctgtcacccaagctggagtgcagtggcacaatcacggctcactgcagccacagcctcctaggctcaagtgatcctcccacttcagacttctgagtagctgggactacagctctgatctctctcataccctccttcccaccaccaatgattactgtaaatactgtaatggatcaagcacgacgtttgcttcagttctgcgtgggcatgaaaagacttctaccaccagcttaccttttatggactcctacatccatataagaatcaaaagggcacttcctgcaggcttctgtcatgggacagccctgggaactgccttgtaataggcacagacctcccaagagcattttaatacccccagtgaacactgtaaacggatggaaatggaattggtcgtcagatatttatgataacattcccattctgacatttcaatgccttcggaagaaccctcctcggctcactcacaagcatcggagagggccttgtccccaagaatacgagaaagcccttcctctctgtgtacctgcagctttcaggcttcccacacctggttggggagcaacctccttcccccgccgcccagatatcagaggagtatacctctcccaggatacccaagatgtaggctccataaacggctcggtccactcccagtgcctccaaccgtccgtccagccaggagccaaagccgccgcctccgccatcgccttcgccaggggctatcgcggccacttcgctgggcgccgccatcttggggtcagggtcctgcaagcccctagggcgcctaccgcagtgcctgacgggccgcgccgcaggtccaccgcgcatgcctgaagaggaagcccaggcccgtaagtgcaaagagcgcagccgtgtcggccggcttgagagttttgtgctttctagatgaagcgcgtcttcgcatacgtgcggtcgcgtgatctcacaagatgcttggcatgtgagtattcttaacagactcattctacagttcgggaagttgagagaggtgcagtaatttggccaaagtcacgcggctaataactacccaggactggagctcagcgtggatgccatcgcttcctccacccgaccgagctgccttccccgcgctttcgggggatgctggccgcccactcccacacagctgtctggcaagaacctcctgacagcctggaataccctcgtcgtcgctaccgacggctaccaccttcacctgtacaagcccttccctgtcaaagtaaaggttgcagaaaaccttccctgattccatggtaggcactcagtaaataaacaggcaacctc

SEQ ID NO: 2122 - DNA, 2747 bp, Homo sapiens
gttggccgcgcggcctcgggaacggcccaggtccccgcccgcaggtcccgggcagataacatagatcatcagtagaaaacttcttgaagttgttcaagaaaaatttgaaagtagcaaaatagaaaataaagaattaacagcagatacagaggacagcatggaagtgttgtcttaggaaacagaacacagcagtgaaaaaacagacaaaatccgctcagatacaactgcagctgataatgttttccggcttcaatgtctttagagttgggatctcttttgtcataatgtgcattttttacatgccaacagtaaactctttaccagaactgagtcctcagaaatattttagtacattgcaaccaggaaaagcctctttagcttatttttgtcaagctgattccccaagaacatctgtatttcttgaagaactgaatgaggctgttagacctctgcaggactatggaatttcagttgccaaggttaattgtgtcaaagaagaaatatcaagatactgtggaaaagaaaaggatttgatgaaagcatatttattcaagggcaacatattgctcagagaattccctactgacaccttgtttgatgtgaatgccattgtcgcccatgttctctttgctcttctttttagtgaagtgaaatatattaccaacctggaagaccttcagaacatagaaaatgctctgaaaggaaaagcaaatattatattctcatatgtaagagccattggaataccagagcacagagcagtcatggaagccgcttttgtgtatgggactacataccaatttgtcttaaccacagaaattgcccttttggaaagtattggctctgaggatgtggaatatgcatatctctacttttttcattgtaaactagtcttggacttgacccagcaatgtagaagaacactaatggaacagccattgactacactgaacattcacctgtttattaagacaatgaaagcacctctgttgactgaagttgctgaagatcctcaacaagtttcaactgtccatctccaactgggcttaccactggtttttattgttagccaacaggctacttatgaagctgatagaagaactgcagaatgggttgcttggcgtcttctgggaaaagcaggagttctactcttgttaagggactctttggaagtgaacattcctcaagatgctaatgtggtcttcaaaagagcagaagagggagttccagtggaatttttggtattacatgatgttgatttaataatatctcatgtggaaaataatatgcacattgaggaaatacaagaagatgaagacaatgacatggaaggtccagatatagatgttcaggatgatgaagtggcagaaactgttttcagagataggaagagaaaattacctttggaacttacagtggaactaacagaagaaacatttaatgcaacagtgatggcttctgacagcatagtactcttctatgctggttggcaagcagtatccatggcatttttgcaatcctatattgatgtggcagttaaactgaaagttgtctggggccatcttgtctgctccttacagcacacatggctggcagagaagggaagacagagcggccatcttggaaacgtctagtccttagttcctgccggcacatctactatgcttcttactagaataaactgtgcagattggtctgatgtatgtactaagcaaaatgttactgaatttcctatcataaagatgtacaagaaaggcgagaacccagtatcttatgctggaatgttaggaaccgaagatctcctaaaatttatccagctcaacaggatttcatatccagtgaatataacatcgatccaagaagcagaagaatatttaagtggggaattatataaagacctcatcttgtattctagtgtgtcagtattgggactatttagtccaaccatgaaaacagcaaaagaagattttagtgaagcaggaaactacctaaaaggatatgttatcactggaatttattctgaagaagatgttttgctactgtcaaccaaatatgctgcaagtcttccagccctgctgcttgccagacacacagaaggcaaaatagagagcatcccactagctagcacacatgcacaagacatagttcaaataataacagatgcactactggaaatgtttccggaaatcactgtggaaaatcttcccagttatttcagacttcagaaaccattattgattttgttcagtgatggcactgtaaatcctcaatataaaaaagcaatattgacactggtaaagcagaaatacttggattcatttactccatgctggttaaatctaaagaatactccagtggggagaggaatcttgcgggcatattttgatcctctgcctccccttcctcttcttgttttggtgaatctgcattcaggtggccaagtatttgcatttccttcagaccaggctataattgaagaaaaccttgtattgtggctgaagaaattagaagcaggactagaaaatcatatcacaattttacctgctcaagaatggaaacctcctcttccagcttatgattttctaagtatgatagatgccgcaacatctcaacgtggcactaggaaagttcccaagtgtatgaaagaaacagatgtgcaggagaatgataaggaacaacatgaagataaatcggcagtcagaaaagaaccgattgaaactctgagaataaagcattggaatagaagt

SEQ ID NO: 2123 - DNA, 1817 bp, Homo sapiens
gttggcgggcagcggcacggccggcagggtcggggtccacaccagggcgcagaggacggccgaggcgtgtctgggccggcagccctggtagcaggcggggaagaggtcggagaggcagcgctccacgctgaaggccgccagcagccagagccccaccgcgaaccacaggaagccatccctcctcccccaggatccacatgggtcgtgttcttagtcctgggagatgcatcaggaccaggctcagcagtggcggcgtcagcgaacactggacagtaagatgttcttgataagagactttttccttccacggactgcgttccgcagctcctgggtggggtgcagagtgtgtcagctcaagccagaaattcggtcgtaaagatgctgtttctcttcatgtttctcaaatggacttggcttcggaaatcacttctgcaacacaaaccagcagcctgtgcagctctgggcgggggcatgccggctacccagctcccggcattgttgcacatggctttgaaacgcacggcacagctcgtgtggcccaggggcacctcctgccaccctgcctgctgcctccaccccagatgccggtcctcgctgctctccgggacctctcccggcgtggctccacctcctcctcgaggtcaccgtccaggcctgtttcaactagcgcctccaagccttgcttacctgcctcctgtttgggtgaaacttggagcatctctattaacttagttggtagctccggtcacctgcagtcaccaggggcccagagggacgcacagagggagaccggctgcctgggtcccttctggctgcctcaccatcaggtgcgggatgaggagctcagcctcagccacagtgcgcaaggtgaagagttttgatccctcgcacatcctcgagccaggcagggcgcccggcttctatcccaggtagcagagtctcctatcccaggtctccgacggcgaccgcaaccctttgcccgtggaggacttcccctgtctaagggccattgggagtgggatggcctaatttctggggtcgctttctattgggcacttcaaacagtgctgggcaagggcagtcgtttgaggcagcttggggtgaagttcttagggaggaggtcctgtgcagctccgccagccccggtcaggcccaggcagccaccaaccctggtttctccatcacccctgacccctcccacagccccttctcgtgtttgcccaccgtctaggccatgcttccactttctcacctggctgggtatcccctatggggcacgggtgtcggccccgcagaggctgggctttggtctgtcttgttctctctgggaggggtctggtgcgggtggaatacgtggagggagcctccgtagggggagcaactgctcccggtgttgcaaggaggacagagccaatgcccgccccatcgtgtcatggccgacggtggcctcagaagatgtgtccacgtcccagtcgctggaagctgtgcacgagctcttcctggagaaaaggcccttggcagatacaaggattttgagatgagctcgtcctggagtatctgtgtgggccctaaatgcaatgacaagtgtctctatacaggaaaggagaggagggacactggagagcagggggaggccacgtgaggttggaggccagcaggggttacacagccacaggccaaggagggccagagccaccagaagctgaaagagatgaggaagcaccttcccctggagccctcagggagcgcggccctgctgccaccttgatctcagacttctgtcctctgtaaccaagggaataaagtcctgctgtgtg

SEQ ID NO: 2124 - DNA, 2484 bp, Homo sapiens
atgtatttaaagttagagcacacacagtcatctgtgattcttggtgtcagtgtttcatcagggtcccctgcacttcagattctgcattccttgcctgtttgccttcaacctgctggtgggcagtccctaagaaagaacaggcatggaagtggggagagccatacgtatttaaaagtgagtttctctgtttgaagaacataaggacatttctcacggcctgttgtgagacgtttggaatgaggaaaagtgaacttttcgaggcatttgacttgtttgatgttcgtgactttggaaaggttatagaaacattatcacgactttctcgaacacctatagcattggccacaggaatcagttttcatctacactagtgaacggagccatggaaggatgattgctaccaaattatttgttatcagatcccacagctgaaaagagagggtgctgaaggcaagggcccttcccaacagaagaaagcattaatgatgaagacatctacaaaggccttcctgatttaatagatgaaacccttgtggaagatgaagaagatctctatgactgtgtttatggggaagatgaaggtggagaagtctatgaggacttaatgaaggcagaggaagcacatcagcccaaatgtccagaaaatgatatacgaagttgttgtctagcagaaattaagcagacagaagaaaaatatacagaaactttggagtcaatagaaaagtatttcatggcaccactaaaaagatttctgacagcagcagaatttgattcagtattcatcaacattcctgaacttgtaaaacttcatcggaacctaatgcaagagattcatgattccattgtaaataaaaatgaccagaacttgtaccaagtttttattaactacaaggaaagattggttatttacgggcagtactgcagtggagtggagtcagccatctctagttagactacatttctaagacaaaagaagatgtcaaactgaaattagaggaatgttccaaaagagcaaataatgggaaatttactcttcgagacttgcttgtggttcctatgcaacgtgttttaaagtaccagcttctcctccaggaactggtcaaacataccactgatccgactgagaaggcaaatctgaaactggctcttgatgccatgaaggacttggcacaatatgtgaatgaagtgaaaagagataatgagacccttcgtgaaattaaacagtttcagctatctatagagaatttgaaccaaccagttttgctttttggacgacctcagggagatggtgaaattcgaataaccactctagacaagcataccaaacaagaaaggcatatcttcttatttgatttggcagtgatcgtatgtaagagaaaaggtgataactatgaaatgaaggaaataatagatcttcagcagtacaagatagccaataatcctacaaccgataaagaaaacaaaaagtggtcttatggcttctacctcatccatacccaaggacaaaatgggttagaattttattgcaaaacaaaagatttaaagaagaaatggctagaacagtttgaaatggctttgtctaacataagaccagactatgcagactccaatttccacgacttcaagatgcataccttcactcgagtcacatcctgcaaagtctgccagatgctcctgaggggaacattttatcaaggctatttatgttttaagtgtggagcgagagcacacaaagaatgtttgggaagagtagacaattgtggcagagttaattctggtgaacaagggacactcaaactaccagagaaacggaccaatggactgcgaagaactcctaaacaggtggatccagatgtgccctgtctccttcatttctttatttccatggcccctgctactagaagcattgtaaaaagccaaaagaagaacaagaaattctgaggacatgggtgaaaatgcagccttgaggtttctgaaaataacaggagacagacaaggctggtgtccagcaacaatactgggtagctctttttgtccccacttacacagcgaaggataaagaagagatcctatggacacttagtaaggattacttcatgttttaattcaaagtactttggaaagaagactttgagcagagtggaatagcaggaggtttttgtaaggtgaaatagaatgaaagtgcagccaagaatttttctgtcttcaattttaaagaacaccggcataactcatttttctttttttcccctgtgttctttttgaccttcttagcagctcctgactttctcccttggggatttttctctgtatagtcagcgctgactcccttagaaatcctgaaccccacacccgtatcgcgaaagagttgaagagaattcaaataaacacgttgagataagtagcttgtgaactaactgttacagcatgcctctgtaataagatactgccagctagaagctaaaataaagtgaaattccattt

SEQ ID NO: 2125 - DNA, 1953 bp, Homo sapiens
gaggagctccagccgcgctctctcccggcagtggctgtgcttcacagcgcttgttgggttccccaccccttttaaataagccgggctggtcaccgccctcgcagacgagtcagcttaagggaggcggcggcagcgcggcggtggggccccaagctgggccggcgcgcggggtcggcggagctgtactgcgcgtccgacatctacgaggcggtgtccggggacgcggtggcggtagcgcccgctgtggtggagcctgccgagttggatttcggagagggcgagggccaccacctgcagcacatcagcgaccgcgagatgcccgaagatttagctttggagtcaaacccttctgaccatccaagggcaagcacaattttcctgagcaaatctcaaacggatgtgcgagaaaagaggaagagcaaccatttgaaccatgtatctccagggcagcttactaaaaagtatagctcatgctcaacaatatttctagatgacagcacagtcagccagcctaatcttagaaccacagtaaaatgtgtgaccttagcaatatattaccacataaagaacagagatgcaaatagatccctggatatttttgatgagagatcacatccacttacacgagaaaaagttccagaggaatactttaagcatgatcctgagcacaaatttatttacagatttgttcgtactctttttagtgctgcacagctaacagctgaatgtgcaatagtaactttggtttacttagaaaggcttttaacttatgctgaaatcgacatttgtcccaccaactggaaaaggattgttctgggagccattcttcttgcctccaaggtttgggacgatcaggctgtatggaatgtggactactgccagatcctcaaggacattacagttgaggacatgaatgaaatggaaaggcattttctggagcttcttcagtttaatattaatgttcctgccagtgtttatgccaaatactactttgaccttcgctccttagcagatgacaacaacctgaattttctatttgctcctcttagcaaagaaagagcacagaacctagaggctatttctagattgtgtgaagacaaagacttgtgtagagccgctatgagaaggtctttcagtgctgataacttcattggtattcagcgctctaaagccatcctctcttaaaaggagaaatgaggggttataacgtcatgggaccttcatctacaaagactggagaaataccacctttcctgctcaaaaaccagcaaaattagtgttttcatcaaaaggaaagatctcaaattcaagagactcatggacaacaaggattatactccacaggaaagaatgggaccttgtcaatgcaacaaaacactcttctgtcctttttaatgtaaacagagttacaaaaaccactccaaagtgaaggctcccatcctacacacagatatttgcttactgtgtgggccgatagctgtgaactatgtaaggttttttaaacaatagtttaaatttttagactttaaagacactaaccatataacttttatgtttcttccagtttctctccctccccccgcattttgctgcatatgcctttaaaatcaatgcagtattaccattaaaacatgggactctaactaaagccacttaggagcagacagcagcgttgttaggtactgaagggttcttcctccctactgttaaccattgaagctgctagtcattggcaatcattttaaaccaaaaagctgctggataacatttgtcattcatattctttgcaagcattactttagcattttagcatgtttggggtcataaacagaggaagtatcagttattgatatctacttctattggagtccatgttgcatttcttgtgaactataaatggtgcttctcattttctgataatttttctcttgctaaataaatgtattaaaagat

SEQ ID NO: 2126 - DNA, 2296 bp, Homo sapiens
aaaaaaaatgcctggaagccacaaatatgctttccatctctatggatttgccaatgtggtattttgtgtcagttttctttcacttggcatgatgttttcaaggttgaattcaagctaaataaagacacatcgtcattccccggtagacttttacaacatgaccttgaaagaaactactcaagtaggcaagtctgctagattgaaagctacataatggcaaggacaccaactaacaaacagcctataaaccttagaggggtgtcatatactttgtgaaccctaactacgaactatatgggctggaaatgaaaactgccacgaggtccttatcagcatttggagattcttccattaagacaccttcaaaatccagaatccagcagggctgtcatagtgctggcccaaatatatctggtgatcatattaatttggtgagctcatcattgtcatcatttcctattcctcaacgttcttctgaagagaaaattctttactcagacaggttgagcctagaaagacaaaagctgaccgtatgtcctatcatcaatggggaagaccaccttcgtttgttgaactttcaacacaattttataactcggatacaaaatatttctaatctacagaagttaatatcgttggatttatatgataaccagattgaagaaattagtgggctttcgactctgagatgtcttcgtgtccttctgttggggaaaaacagaatcaagaaaatctcaaatctggagaatctaaaaagcttagatgtcttggatcttcatggaaatcagattaccaaaattgaaaatattaatcatttgtgtgagttgagagttttaaatcttgccaggaactttttaagtcatgttgataatcttaatgggctggattcactaactgaacttaacttgcgacacaatcaaatcactttcgtgagagatgtggataatttgccctgcctccaacatctctttctcagctttaacaatatatctagttttgacagtgtttcctgccttgctgactcttcttccctctcggacatcacctttgatggcaatcccatagctcaagagtcatggtacaaacacactgtccttcagaatatgatgcagctgcgccagctagatatgaagagaatcacggaagaagaaaggcgtatggcatctgttttagccaaaaaagaggaagagaagaagcgggaaagtcataaacaatctttgcttaaggagaagaaaaggttaacaattaacaacgtagctcgacagtgggacttgcaacaacgagtagccaatattgctacaaatgaagatagaaaggattctgactctcctcaggacccctgtcagattgatggaagcaccctctctgcattcccagaggaaacagggcctctagactcaggactcaacaatgctttacaaggtttatctgtcatagacacataccttgttgaagtggacggggatacactttccctatatggctcaggagcactggaatctctggataggaattggagtgttcaaacagcaggaatgatcacaacagtctccttcactttcatagaatttgatgaaatcgtccaagtgcttcctaaactgaagattaagtttcctaattctctgcaccttaaattcaaggaaacaaatcttgtaatgctgcagcaatttaacgcactagcccaactccgtcgtattgaccagttgacaattgatcctcaaggaaatccagttgtcaattttacactctggaaatactatgtactgtttaggctaagccatttcagtatgcagaaaataaatggaacagaggtgacacagaatgatatgataatggctgaaaggctctttggaatcctagcacatgtagcgtcttctgagttaccccagtatcgtctgatttccattctgggtgatgccaggaaaaagcaatttcggtatctactagaatccaaaggaaaaaaacctggtattatcaacgaagaaaataatgacagcaaaagacttgtaggagaaaacacaaatcgtgctacattaaattatactacaagagacttttataatgaaaagctagaggaaataaaggaaaagaagaaattctgtaaaacatatatagaagaccttgtgaaggaagccacagaaatcaacatgaaaaatgaggctttgcagaagctctggccacagatgttcattgagcttgttagggatgcagtcatagaaattcgcaatgaaaattcctatatgaagctctgcctacagcagataacagaccaaaaataaaaatggcctttagttac

SEQ ID NO: 2127 - DNA, 2029 bp, Homo sapiens
aaaaccgtccttcacaccgcggactgcacaggcacaggctgaagcgctgtggtcccgcagggatcccctcgcctgggccgttgtgtgggcggactcgcgagggaggttcacgacgctctgccccgccccgcggcccctgagtgagtgcgcctggaggggcggagggcagggtgggcccgcacccagcgtggccatggatgatcccctcgcggccgccgagcgctgcaggcgagaagcgtgggccaaggcgtcagcagaccctgggcggcggctgtggaggaggccagcgtggagtacggctcggcccggtacctgctgctgtgcggcctgggcgggatgccgagctgcggctgacacacacggccatcgtgtccctgcacctggtcaagtgccgcatgcaggtggaccccggctggtacaagggcgtcctcagcggcttcggcgtgacggtgcacagcgacgggctgtgcggcctggctcgcggctgcgctcagaccttcttcggctactccctgcagggcttcttcaagttcggcctttacgaggtcttcaagatccgctccgcggagctcctgggcccagagaaagcctacgggtggagagccggcctgtaccttttcgcctgggccagcgccgagttcttccccgatgtctcgctggagcccatggaggcggtcaaggtccgcgtgcagacgcgaccgggctacgccagcaccctgcgagccacggcgtccaggatgtagggcgaggagggcctgtgggccttctacaagggcgtggcgccgctgtggctgaggcagatcccctacaccatgatgaagttcgcctgcttcgagcgcacggtagaggacctctacaggtatgccgtgcccaagccccggagccagtgcaccaaggccaagcagctgggcatcaccttcgtggcgtcttctgcgctgtcgtgtcccatcccgccgactccgtggtgtctgtgctgaacaaggagaagggcatcgcggccctgggcgtcctccgaagactggggttcacgggcgtgtggaagggcgtcgttgcgcgcatcggcctctttgcgcacatccccatgatcggcaccctcacggccctgcagtggtttatctatgacctggtcaaggtctatttcaagctgcctcgccctcccgtggctcaagcgcccgaacccctgaagaagaaaaagtaggtgtgaagttctgaaccgctctagccacagtgggtccacatttccgtcaagtggggaatcgcgtgcaaacaatgctagtgtgtaagatgttaacattttgggcagaggttacttaatatgcagtctgagttctctttaaatgactgcttctttttggcaactcaagaggattgcaaacatttcgtttgggggtttgaaccattatctttggggagttggcgtggttgctttaactcaatagcttttcagcaattaaaaggaaaaaatacttaacaggaagtaatgttaggtagtttagggtctctaggtgttatctcctttgattcgccctttctgtagagattatccaagcataactactgaatagcctgcaaatgaggttttaaggtcagcacaactatatggatggggaagaaagtgagattctggtacacggtgttcatctcaatagaaatcgggcacctattgaatagatgaatgactcatcgcatatttcctgttcacgtccattacaggtaaaaaattattaaaagttaaattgtgacttatactgcctgatagcttagaatgtattcactgttttcaaagagacatgagaagatctgcattttctccttttgctttgtcccttctcttcctgatgttgctgattagaacatagctctctccaggaagtgctacaattggatcaatgtggaaagccagaaagagatgaagggcaggctctgggaataaatatgtaaagaaaagcctctgttctccagagatttcttttgtataactcagctttcaacagccatacatccaaagaagaccataccaccctgacat

SEQ ID NO: 2128 - DNA, 2266 bp, Homo sapiens
agacactgtgctgggtgctggcaggacgagagtggtgaactaaaccaagtccttcctgtggagctcactgtctatggactgattcttccttcgtgtcctcatcatctgctcagtccagggatgcagtagacgctagttgctacctgaggggacatctgctctgggactcagagaatgataaagagatctccagaataaatgaatcactttcagagaaaagtaaaagaacaaaaacacaaaaataaaaaacacacaaaagaagcaaaaaaatactacattctccccaaatttcacatcgtaagtggctggaagtgcaaacataaaggatgctagcaacatggccgcggcaagaggagcctctggagcaaggtcagcttctcccctgatttctggctttcagccaacaaggccaatggatcttccaaaccagctgctgctgctgagctccagaagaggggcctctcaacttccagaggccaggaaggctcaccctcggagctctcagttttgttttttatactgcaagacagagagattcgaagtggaggggggaagccaacaggggcaggaggactctggagaaatctcaggcctccatcatctggacctcacctgcctcctgcaggggcttcttggaggtggtgaaacccaagcaggaggcactgggcagccaaatctctagttcatgcctggactccctttcttctttagtgaaaaaggaagctgacagggctggggagggaggatagtgataactcactctggagagtgagttagaaggacagggaggtatggtcacactccaactctctaggtccttctaataccagcatctaagggccaagacgccagtctacattcctgactcactcccttcctcgaccaaaacatactgaatctttcctccataattctgccccagtgtgaataccccccagagacagggagtcccccgccaggacagcttccctctctgcggcatcacagtgccaccgccggctctggcactatagctttccctccttcttcctgctgccccctctcagctcgatcagcactgttgggcagaaatttgcctttaaggatgaagagtgagagcccctccccacttgcagaatataaatgcaaccagaagggatttgtcttcacctttcagcttctggaggagggaagcagctggctggtggcctcctccacagggaccattctcaactgtggggcaggagtggcctctagtggtcatggggatcacagccatcatcaccccagctcgcaggcagagcccaggggccaagcacctactttgttcatgatccagtcagcatcttcaatggctcttttaataatctgctggattctctcagggttgtcttcatctgaatgaacccgaaaactctgcaagtttaagcataaagaaagatgactaggcaaaattcccaggacaggcagcttcagagcaccaatcacaggccagggacactgctgggcactttatacccagcagctctcttcatcctccatagactgttatgattatcccacacagagatgaggaaacagaggctcacttgctgctgaacaatagcatttgaatcctagtctatgtgactgcaaagcatgtactcctgccaccaaggtaggtgcaaaaagactggcccccaagttactgccaaatcaagctaggcccaaaggctatcaggcagtagagtccaaggggaaacttccatctctcttcctcagaagacgctgctttccccagggtgagatctctgcataggctttacagcagggaggaagaagtaggacttctctcggcccagtgctaggagagctacacagggaagggaggggaggtagtagatagagtggcctcaggaaatccacccaggcccagtgcagagcatgggatactgtttgcttttgaccagatattcatccttgagaagcaacctaagattcaggttttgcttttcaaaaagaactggcaccaggcatggtggctcatgcctgtaatcacagcactttgggaggccgaggcgggcagatcacctcaggtcgggagctggagaccagcctgaccaacatgataaaccccatctctactaaaaatacaaagttagtcgggcgtggtggcacatgcctgtaatcccagctactcgggaggctaagggaggagaatcgcttgaacccaggaggcagaggttgtggtgagctgagattaagccattgcactccagcctgggcaacaagagtgaaactccatctc

SEQ ID NO: 2129 - DNA, 1923 bp, Homo sapiens
aacacatgaatttggaggggacaaaaacatttcaaccgtagcaccatttgtctcctttgctgctattggagggagagtcccaatttctcattagtttatgcagcttgctgcttagtaatgacttatcaatgacagttgaaacttgtagttgtatttgatgaaggaaatatgcacatttctttatagcacttagttttttgctttgtttttctactttattaacatgcaggcaaagtgggagtgtttatttttaaagaagctttgagcattagacatgttttaaatctatttcttcgtttaatatcagttggcttctaagaagtgtttctcatcaaaatggaaacaataaggcttagatatttaagataaaatgtaccagctggaggatgagtctgcgcatttggatgaaatgccactaatgatgtctgaagaaggctttgagaatgaggaaagtgattaccacaccttaccacgagccaggataatgcaaaggaaaagaggactggagtggtttgtctgtgatggctggaagttcctctgtaccagttgctgtggttggctgataaatatttgtcgaagaaagaaagagctgaaagctcgcacagtatggcttggatgtcctgaaaagtgtgaagaaaaacatcccaggaattctataaaaaatcaaaaatacaatgtgtttacctttatacctggggttttgtatgaacaattcaagtttttcttgaatctctattttctagtaatatcctgctcacagtttgtaccagcattgaaaataggctatctctacacctactgggctcctctgggatttgtcttggctgttactatgacacgggaagcaattgatgaatttcggcgttttcagcgtgacaaggaagtgaattcacaactatatagcaagcttacagtaagaggtaaagtgcaagttaagagttcagacatacaagttggagacctcatcatagtggaaaagaatcaaagaattccatcggacatggtgtttcttaggacttcagaaaaagcaggaccttttttctatcagtgcttatgtttatgctcagaaaccacaaatggacattcacagtttcgaaggcacatttaccaggtcggaaatgttcgctagacaatgtgtggaagtacaaggaagtcggagagcaagtgctggttggctgaaaaacctggttcaaacgggagcgtatggctcagtctgcaggaagacagtgacccgcccattcatgaaagtctcagcatagaaaatacattgtgggcaagcaccattgttgcatcagttctcttgatgaccttggcaagtgggcccgactagttggacactaatgaggcatcgtaacatgccggccccatcctgtccattctgttctctttgccatctagcattcagtgttgtgtcttcctagtgggcatgaagacggctttaaaaccatccactcgagaagcttaattaaggtactgtaataggtgttgtcatttataccggaaaagagactcgaagtgtaatgaacacatccaatccaaaaaataaggttggtttgttggaccttgaactcaatcggctgacgaaagcgctatttttggctttagttgctctttccattgttatggtaaccttacaaggatttgtgggtccatggtaccgcaatctttttcggttccttctcctcttttcttacatcattcccataagtttgcgtgtgaacttggacatgggcaaagcggtgtatggatggatgatgatgaaagatgagaacatccctggcacggtcgttcggaccagcactatcccagaggaacttgggcgcctggtgtatttattgacagacaaaacaggtactgttcgtggtctgtgttcacctttgaatggacaaaatgacatttaataaaaaatggcatagcgtatag

SEQ ID NO: 2130 - DNA, 2773 bp, Homo sapiens
gtttgcgagtttgtgagagtccttggtggaggaggttggaaagcgttctccctcccacaaaacccggtgcagagggagggagagccaggtccgtagcgtgggtccaagaaactatggatcctggaagtgagcacacttttgtgtcttaaaaagtttggtgtctcgttttgaggtgaaaaatgaatgagataagtgctttttaaaaagaagtcttctattgttcaacagttatgaacaaggactatcaaaaattttggtcatcaccttcagatcctgtacattttgaagcggatacttctcatgaaaaagtagaaagcatgtcagaatcggataccatgaatgtcagcaatctttctcaaggtgtaatgctttcacattctccaatctgtatggaaaccaccggcaccacttgtgacttgcctcagaacgaaataaagaattttgaaagggaaaatgagtatgaatccacactttgtgaagatgcttatggcacactagacaatttgttaaatgataacaacattgaaaattactcaacgaatgcactaattcagccagttgacaccatcagcatatcttccttgagacaatttgaaaccgtttgcaaatttcactgggtagaagcatttgatgatgaaatgacagagaagccagaatttcaaagtcaagtgtataattatgcaaaagacaacaatataaagcaagactcatttaaggaagaaaatccaatggaaactagtgtttctgcaaatacagaccaacttggtaacgagtattttagacagcctcctcctagaagcccgcctctaatccaccgcagtggagagatgctgaaatttacagaaaagtcactggctaaaagtattgccaaggaatctgccctcaaccctagccaacctccaagcttcttatgtaagactgcagttccttcaaaagaaatacagaattatggggagattcctgagatgtcagtcagttatgaaaaggaagtcacagcagagggtgtggagaggccagaaattgtctcaacttggtcttcggcaggcatttcctggaggagtgaagcatgtcgggagaactgtgagatgcctgactgggagcaaagtgctgaaagcttacaacctgttcaagaggacatggctttaaatgaagtcttgcagaaattaaaacatactaacagaaagcaggaagtgcgaatccaagaactccagtgtagtaacctgtatttagagaagagggttaaagaactacagatgaagattaccaaacagcaagtgttcattgatgtcatcaataagctaaaggagaatgttgaagaattaattgaagacaaatacaaaataatcctagagaagaatgatactaaaaagacattgcagaatttggaagaggttttagctaacacgcaaaaacatcttcaggaatccaggaatgacaaggaaatgttacagcttcaatttaagaagatcaaggctaattatgtgtgtttacaggaaaggtacatgactgaaatgcaacaaaaaaataaatctgtaagtcagtatttagagatggacaaaaccttaagcaagaaagaagaagaggtagagagactacaacaactcaaaaaagaactggaaaaggccacagcttctgctttggacttgttgaaacgggaaaaagaggcccaagaacaagagttcttgtctttacaggaggaattccagaaacttgaaaaggaaaacctggaagaaagacagaaactgaaatctagacttgagaaattgctcactcaagttagaaatttgcaatttatgtctgaaaatgaaagaacgaagaatataaaacttcagcagcaaatcaacgaagtaaaaaatgagaatgcaaaacttaaacagcaggttgcaaggagtgaagagcaaaattatgtccctaaatttgagacagctcagttaaaggatcaattagaggaagtcttgaagtcagatattaccaaggatacaaaaacgacacattctaatctgctcccggattgcccaccttgtgaagagaggctgaatcctgcagatataaaaagagcttctcagctggcctccaaaatgcacagtcttctggctctgatggtgggacttctcacatgccaggacatcatcaattctgatgctgaacatttcaaagagagtgagaaggttagtgatataatgctgcaaaaactgaagagcctccatcttaaaaagaaaactttagatgaagagctactgaaacataaagatagaatcacaacctttagagagttaattgctaaggaaaaagcatttcaagatcatgctattaaggtcatagactgtgattcagatgaagccaagagtatcagagatgtacctacccttctgggagccaaactggataagtaccacagtctaaatgaggagcttgatttcttggttacatcatatgaagaaatcattgaatgtgctgaccaaaggcttgcaatatcccactcccagattgcacatttggaagagagaaataaacatttagaggatttaattagaaagcccagagaaaaagccagaaaaccaagatcaaaaagcttagaaaatcatccgaagtccatgaccatgttggcatataacttgtacatatttataggatacaggctgggcgcggtggctgacgcctgtaatcccagcactttgggaggccgaggcgggtggatcacttgagttcaggagttcaagaccagcctgaccaacatggggaaccctcgtctctattaaaaatacagaaaatt

SEQ ID NO: 2131 - DNA, 1625 bp, Homo sapiens
tctcccgcatggtagctggagcagcaaacaactgcttagggatttgaagccaggtgtcctaacttcctccatgggcgctcagcctggggaacctcagaacacttgctctaggatccagacactgtttaggagggtcaagaccttactcatcaaagccccgcctcccccccaacctccgcctccacccccatcctggaaccctggctgtacacacgtgtatgggtacgcgtttggccacatgcatgacaacaaccttgaacatctcccgtcacagcaggtactggacacaggagagcagctgatggtccccgtggaagtcctggaagtggataacaaggaggccttgtggaagtttctactctcaggagctatggccggggcggtgtctcgcacgggcacggcacctctggacagagccaaggtgtacatgcagctactcgggaggctgaggcaggagaatcgcctgaacctgggaggcggaggttgcagtgagccgagatcccccgaccgcactccagcctgggcgacagagtctactcctccaagacgaacttcaccaacctgctgggggggctacagagcatggtccaggagggcggcttccgctccctgtggcggggcaacggcatcaacgtgctcaagattgctcctgagtatgccatcaagttctccgtattcgagcagtgcaagaattacttctgtggaatacaagggtccccgcccttccaggagcgtctccttgctggctccctggctgtggccatctcccagaccctcatcaaccccatggaggtgctgaagacgcggttgaccttgcgtcggacgggccagtacaaggggctgctggactgcaccaggcagatcttgcagcgagagggcacccgcgccctttaccgcggctacctgcccaatatgctcggcatcatcccctatgcctgcaccgacctggctgtctatgagatgctccagtgcttctgggtgaagtcaggcagggatatgggggaccccagtggcctggtcagtctgtcgtctgtgacgctatccacgacctgtggccagatggccagctacccactgactctggtgcgcaccaggatgcaggcccaagataccgtggagggctcaaatcccaccatgcgcggagtcctccagcggatcctggcccagcagggctggctagggctgtaccgaggcatgacccccacgctactgaaggtcttaccagcaggtggcatcagctatgtggtgtacgaagccatgaagaaaaccctgggcatataggctgtgagctggacgacacagcctaggcagaaatgggacaggaggacctgatgacccctggccccaaagagccctcgaggcctcaaggttcaggccctggggcagtttttggtggcaaaagcggggtgggggtggggctctgggtcagaagattcctgaagctggggttggtggtgggtggaggggggcagtgctgggtcagaaaactcctgggactccctccccagggtgcagcctgagacaagaaacgtggactccagtctggccccttgtgggtcgtcctggctccagggcgaaatggtgaacatgtcacacaacaaggaataaagagatggtttttgctg

SEQ ID NO: 2132 - DNA, 1591 bp, Homo sapiens
cttctgaagccagcgagaccacaaacccactgggaggaatgaacaactctggatgggaagaatgaacaactccagacatgacgctttaagagctgtaacactcactgtgaaggtctgcaccttcactcctgaagccagcaagaccacgaacccatcagaaggaagaaactcggaacacgtccaaacatcagaaggaacaaactctggacacaccatcttaagaactgtaacattcaccacgaggatccgcggcttcattgttgaagtcagtgagaccaagaacccaccgattccggccacagccttgcagagactatatgtattttttcttatcaacatatcgttgaagaaaattacactactgggaggcatgctgtagcaaaatgggctggcaaaaagccagagctgttctgaagatacagcagctagcccagttcctaaggtgctgatttagagtgactttggagtgtccacttactgaagtgtaaaatcgctaaaggagattttggtgggagtcggagtaagctgcttaattttgggcatgttaatttagagacagctatttaggacatatgtggagagggcacgcaggcagttggagacacgagttcagggagcgttctaggctgtggacgtagatttgggagttggtggtatgtaaatagaatttataaacatgagactgagtgaaagcatcatagcagagggaatgtttaaagaagagaggaggcctggggatgtttaacgcttagaggcacaggtatgaggagcctgtgaagcagaatgagaagtgtcaccaattgaggcagaaggagaatagtgaggaagtggaagctacagaagaaagtgtttcaggaaggaaggagttaccagctgtgacacatgtggtttaggacaagtgagttgagccttgaaaattggccattggcttcagaaaagtgtagtagttggtgaagttgaagaaagctgcttttagtgtggtgttgggaacaatgcctggcagaattgggctcaagaaacaatagaacaaggcaaggtggagacagcaaatacaggcaaatgtgttgggcagatattcaggtggttaccaagtaggcaggtagaaaaactattttggtagaaaactgggtgattggaaatgttggcatttcaggagttgcatttggtttagagacataaataccattcagggggacaagtcctctgaagaggtatctagtataattgcatctgagaacaaaaaccaggggaaaacaaaccataaaccacgggctagagtagagggtcccagacattaagatatataaaagggccgggcgcgatggcttatgcttgtaatcccagcactttgggaggctgaggcgggcagatcacgaggtcagaagatcgagaccgtccaggctaacatggtgaaaccccgtctctactaaaaatacaaaacattagccaggtgtggtggtgggtgcctgtagttccagctactcaggaaactgaggcaggagaatggcctgaacctgggaggcggagcttgcagtgagccgagatcccgccactgcactccagcttggacaacagagcgagactccgtctc

SEQ ID NO: 2133 - DNA, 2051 bp, Homo sapiens
agctcttgcctgggccctgtctgtgggaagcaccttgtgacatatctgtgcatccattactttggaggtgtgactctcctcttccatctgcaccatgcccagagaaagattgtgttgcatctctgggttcagcaaccaggtgctgtgtttcttgtgcccaggccttgcctgcagagagaattgtgacatagctgggtccagtaccaagtaacgtgactttgttgtctgtgccttgctttcgagaaggaattgtaacataaccctggacaggcaaccaggtaatatgactctcctgcctggtccttgtcctgaaaaattgtgacatatttccgactcagcatgcaggtgatgttactctcccatttactttctactcacaggttagattgtgacatacactttagcccagctcacagttgcgatgatgatactcataccacaaaccagtccatagcagagatactggtgctggtagctagacttagagaaacaggtaaagtcctggattaccattctttcacattttgtataaagtctttggacggtacagagagtgttatcatagggccaagcacacaggtgagactgtttctcaaatgcacaacctaccaaatgttagcattgtcaccctcacacgaatttcacacgtgaatggagtccacagtaaaaattgtgactgtcatatgtaatcatgtgacaacagttaagatggtgactcatttctaaacctagctcataggcaggtgagaactcttttctctagacccagccaattggagagatgttgactctaatgcatgagcctaggtccacaggtatgattatgagtttgtattagaaaaaaaagtctcagagcaaattgtgaccatcatggatattgtataaagccctcaggtagtatagagagttctataacagggcctagcacccaggtgacattgtgacactcgtatgcaaacccagccaacagtgaaaattgacaactttccacatgaacacagctcactgttgaagttctgaatctcacacctggaggtggttggaaaattgactctcaaacgtggattcggttcacacgtgggctggtgactctcaaaccaagattcagcatacctgtgaggctgtgactccactaaggggacacagtccacggcaaagattgaggctctcatggatgtatccagtccaccgttgagattgtgacttgtgtacttggactcaacatacaacatgtgttgactctaatactaagaaatgggatgtgtgggattgttcattcctacatttttttgtgactgtgattgtaacatacacctttgcccagcacctgagtgatttgactctcctgcctggtgcctagtgcacagatcggattgtgacacattgctgaatccaacatctaggtggtgtgactctgtacttttgcctcagcactgcccacaggggggcattgtgacatatcactggaccccacaccctggttatgtgactcttctgcctgtgccctatcttcatgggccattgtgacattgctatgtgcaacatccaggtgatgtaactttccttgctggatcctgcttgcaggaagcattataatctatctgcatccatcacccaagtaatgtgactctctttctaccaggttgctgcttacagaaagaattgttacctatcactgggccagcacctagctgttgtgatgcttctttttctacctacattcagctcacaatgtagattttgacatactgctgggctaaacaccaaaaatgaagttacgtttttcctcagcactttcctcatcaggcattgtgacatattgtttggcccagaactaaggtaatgtgagcctcctgcctgaaccctgcccatagtgggcatagtgacatatttgtgaacccatcatccatataatgtgactttcttacttggcttttccctataggagagattgtgacatatatttgagcccagaaaccaaataatttgacccttctttcctgctatggccatgctcccataaaagagagtgacttattgctgcgattagc

SEQ ID NO: 2134 - DNA, 2150 bp, Homo sapiens
ccttatccctcagcagagtggtgggttccccctatcttcagcctcctttactctgaggggagtgagctccagggctgggaacccaggttcacccgctgaccgtggcattgcattgcccttctcccaacagtgtgcttctgcccttggcctgggctgctacgtggctgccgctgacatccaggtgaggggtctttgggcacaggtggtagagcatctagggctgtaactctgcctctgagctcccctgcctctctgtgctcctaggacctggtctcttgccttgcctgcttagaaagtgttttcagccggttctatggcttggggggcagctccacaagtcctgtggttcctgccagcctgcacggcctgctctctgctgccctgcaggcctgggcattgctgctcaccatctgccctagcacccaaatcagccacatccttgacaggtaggggtggctgtccactgggagggggaggggatctcaaagaggcccccaagccacacatatagctcagcctgccccttccctaggcagctgccccggctgccccagctcttgtccagtgaaagtgtgaacctgcggatcgctgccggtgaaaccattgcactgctctttgagcttgcccgggaccttgaggtgcgagggacaaggatggggggtgcttggtgacaccacctgcccatcacaggctggatgcagggggtgccacacaaaacagaacagctttaggtcattatgcagaggaggtggccccaaaacagatttatctcctagatgtcatgatgggtgccctcagcagtggtgtcctggcctgacagaggccaaggaggggtcaaaggggccaggcagagaagagagggtctctcagtgaaaggaggggtttgggcagtgccctgttcagagccagcagagctcaagcatctaccacacaccctccaatgctcccattgcaggaggagtttgtttacgaggacatggaggccctctgcagtgtcctgcgcactctggccactgacagtaacaagtaccgtgccaaggctgatcgtcggcgccagcgctctactttccgcgccgtgctgcactccgtggaggtgtgtgtgagaacatatgtgtcctagcaagggtgcacccccaggcatagcagccaagcccagttgtgttggcacctctaccctgcagggcggtgaatgcgaagaagagatagtgcgcttcggctttgaggtgctctacatggacagctgggctcggcaccggatctacgctgccttcaaggaagtgctgggttcgggcatgcaccaccacctccaggtgcggggacggacagggaggggacatctggtgtggttgcttcagtctagcctgagctcactgccctctgccccccagaacaatgagctactccgtgacatctttggcctgggccctgtgctgttgctggatgccactgccctgaaggcctgcaaggttccacgctttgagaaggtttgcacccttgggcacctttctcttccccctattcccatttcctggaggcctggaattctgtagaggccggaagaggacccccagccctttcccttcccagctccccagggtgtcactctctgtccccactctagcacctgtacaatgctgctgccttcaaagcccggaccaaggctcgaagccgtgtgcgggacaagcgggcagacatcctgtgaagcaggacctgctgaagaggagactttctatgcccttggtccgtatttttaacagaagacagtgcaacaactggtctccaccagtatttgtcactttattttttttaatgacaaaaccaaaaacagacatggggtgggtagctgggggcccggacacttgggaccctgacccctttgtccctgcactcagccctgtggccccttcctgtcctgtctcaggccaggctaaatatgtgccttcctcagggctgtggggcaggcactagggggcctttcccttcctttcctttctcaggccttgctcccccaggatgacccactcttaggggggtggtggcatctggacaaatgccaccacagcaggtggggtggcaaagctacctggaatggatttgtgtgctgatttttaaggattattacagataattaaacagaacggtcagccttc

SEQ ID NO: 2135 - DNA, 1626 bp, Homo sapiens
agctttcgcgaggcaccgctttggcgcccggaccgaggtgcgccagggtcaggaggccgacgcagcgggaggaagccgcgccgtcgggctcagggagctgggaggctggttccggggcgtggtttctccgccttgagccaggaagaagatgcaagccagccccatccgtatcccaactgttagcaatgacatcgactgggatttctgcttccgtatgtcacagcaaaccgagatcccagctcaccagcaaacagatgagttgtatcccactggtgggtgtggagagagtgaagaggaaactagctaaagagaaggagaaggccatagactgtatgtctcatcccaaagagaaattagcccaatcccagaagaaagtagctcagctgattaaggaaaaaatgaatactcaagcaaacaaggagctgattcgatgtgtcatcctttctcggattatttttggggaccatcactggaaatgtgcacgagctctggccaacctagcttatggctacttgacactgagaggcctcccagttcaggccaagaaacatgctacatcagccaagaatacactgttgacctggaaggcaaatacgacctcaaataaggagaaagaggaaatcctggaagctctggtcaagctgtactacactctggccgtggcctggctcctgcagaaccgtggcagagaagcctatttcaacctgcagaaggcagagagaaacatgaaggagctgaaagaattatataaaggaggtgtttgtgaattacaagtctctgagaacgacctaacacttgctttgggcagagcctccttggccatccacagactgaacctagctctggcatactttgaaaaggcaattggcgatgttattgctgccaagggtgataggacgtcagatctgatcagcctgtacgaggaagctgctcagatagagcagctgaggaggaaccacaaccaggccatccagtacttgcagcaggctcattctgtctgtgttcctttgttcactgaagtcagccccaaaactgcagaaatgagtgcgttactggccaaagcttatgccatgtctggagaggcccagcacagggatgctgttgagatatatttcataagaagtatcaatgcatatcgagcaacattgggctcagaggattttgaaacactgagcaccactgaagaattttgcaaatggcttgtccaaaatggagaaaaacagatattccaaaaaaggagatataaacatgaccataaaagacatgaaaagatgtttaaccccattagtcatcgtggaaatgcaaatgaaaaccaccatacagacactagagtggtttaaatttgaatgacttccaacaccaaatgccagacaggacatagagcaactggatgtctcatgctcacaggcagaagggaaaactactgtgtgtgacaggaagatggacttacccaaccttcagcattctcaatctcttgtctattaacatgtgtttgaaacattatgcattcaaagcaaacatctgggaggaagatgggagaagccttcttgcccctgttctacagaagtaattgaagttcatgacattcaagctcattcaccagtaaatgaatttgggtcatgcttt

SEQ ID NO: 2136 - DNA, 2140 bp, Homo sapiens
aatagacacaaggagaggcaagaagctccacctcaccccagtgggggctgcaggtggatggagaccagggcatgcggagcgcccctgagcagccgtggctggggtgggagcagggccatgatggctctggagaaaagtggggcaggcagctgcctccctggggctgaggggctgcaaggagaagttgcatccctatgcatggcctatgcatggtacccagtccccatggccaccctggcatttcaggcatctgctgtgcgccaggtcaggccccagaccggcatcctctctctctctgtgcacccgcacctggcaggaagcggcagcaccatctggttgcctggcaaccttgtcctgctcccagctgcctgtggccccactggactcagccccccagcagggaggccttcggctgcagggcaggggctgggcgggcgcaccctgtggctgggggcactcaggagccctggcttcacctctgctctcggcgcacatgtggacagctcaccctccagcaggggcccggaccaaagtccttgacccaccgggttctgagtcctgacagggctgtggacagcttccctttccaccccggcacctgctggcaggagcttccgggccctcaccctggggcagcaactcctgcaccaccagccacgcccggccacgagaaagtgcagaacagctcaggcccttctcacaacttcctggagctcagacacagttttttgagcacaaatggtgttaggtgacagactcgggattggccttggacactcagccccctctttctggagcaaagactcatgacccacgtccaagtcaccctgcacatccctaagcctgaccgtgaggcagccctcacggatgcccaggactccctgtccgcaccaccaggcagccgaggcaggtttggaccagcttctcacactcacaccttcctagggttgccccaggccctgacctgctgaccctgcagctatgacctctgacctgtggaggatgggaggggcgagcagcagggagagtgggaaggaggaatggaaaaccgtccaggaagggaggctgcagccccgacacgaacaggagccaccaccagggggtgctgtgcagggctcccggaggacaggaccttccagggcctccctgccccgaacccataggtgccaggcttctcactgctcacgacctccgtgccgggctcatacctgccgcgccagcccctcttcagcagagcacaagtctggcagcaggagggcaccagccaggggccccgcgcccccgcctctgtacagcagggtcaccgtggggtgacatgagaacaccgacccagggaatgggctcctgccacacctgcctgggaacctgggctgtgagtcctgcccgctgcaccctctagcctgacgttgaagtaacctcgccagcggggccctctgtggcactgggcactcagggagagcacgtggcattggagaaggtcccacccccaaatgcaaagctgggaaaaccaggctgagccggggatcaggccacctccgcagggacccactgctgcctcttccaggagcccaggagacccagtgggtctcctgcccccgactccaactccctcctggcaggacacacccagctcacagtggcctttccatcctgggaaagggagtgagaggaggctcaggccagggacccgcccagctctggccggcaaccgcccttcagcctttgttcctgaaccactgtgtgggccccaacccatccgctgcctgccggagggagcccatggggaatggactattcttgccacccctatccatggcaggggaggggctcagcatggctcttgcccacccagaagaaggtgcagggggcctggcgtggtggttcacacctttgggaggccgaggtgggtggatcacctcaggtcaggagtttgagaccagcctggccaacatggtgaaaccctgtttctactgaaaatacaaaaattagccaggcgtggtgatgggcacctgtaatctcagctactcaggaggctgaggcaggagaatcactttcacttaaacccaggaggcggaggttgcagtgagttgagatcgcgccactgcactccagcctgggcaacagaacaagactccgtctc

SEQ ID NO: 2137 - DNA, 1532 bp, Homo sapiens
aaaaaaaccagaagacagatgtgctgtgtgcagacgaagaagaggattgccaggctgcctccctgctgcagaaatacaccgacaacagcgagaagccatccgggaagagactgtgcaaaaccaaacacttgatccctcaggagtccaggcggggattgccactgacaggggaatactacgtggagaatgccgatggcaaggtgactgtccggagattcagaaagcggccggagcccagttcggactatgaagcgcccagaggccaacggtcccccagccatgggcgctgcagctccggccgagtccgcagacctcgggaacttctggaaggcgggagaacccctgctgcaaggccccgacgccctggcggctcccatgagcaggtcacccagcacgccccagaccacgccatctccccagggtcgccagagtccctggcccctgaggtccctgactcagagccatattgagtacttccagtggggacgcccggtgcccagcacccacctcatcgaggtgcggcccacccaggaccccgccaagccgcagcgggtggtctccgagggctggaggcgccctgcccttcccggggagaccgctctggggcgagacctctcctgtgcctgggagggttgcatgaaaggggggctgtgtcgtgcctggaacccaggacggacctggagcccggtgaccatcgggatcgcgccccctgagcgtcaggagagcccctggagatcccctggacagagagcccgccccgcaggccgccccgccgcccaggagctcctggacccctgcacccgggagactctgctgggggcgctcagccagtgccccaagggaagcgctaggttcgacggcccgttgtggttcgaggtctcagacagcaagggtggcaggcggaacctgcagccccggccctctgccttcaagcccctgagcaaaaatggagcggttgcttccttcgtgcccaggccagggcctctgaagccgagcctcggcccctggagcctcagtttttgtgatgatgcttggccttccgtgctggtccagcccgccccatccgccatctgggacttctgggaggcgacaacgccttcctgcggcagctgcagtagggtctccttcgccctcgaggtcacccagtctgctggcccctttggctcctaagaatctgggctctgctacccacctccggagacacaagcccacgtatctactttcacttgctcatccttgctctacctcaacgtggggccctgacaccacgttatcaaacatgcagcccccacacccctcgtctgcccgcccccagatcttccctctgtgctccctgccaccccagcagctgttgatttcagaacccttgccttcgccctgctggccctctcctccctgcccttcttcctgcccttcctctgaaaagaggcatttcgggaaggcttgctttttctccatgtctcccagtttgtatagttaaattgtccagttgtatagttaaatatttgatcttattaaaaacatttgtctgc

SEQ ID NO: 2138 - DNA, 1932 bp, Homo sapiens
aaaatgaatttttgggatggtacaaggtaagagtcaatgttccctctctctctctccttttttttttttaagacggagtcttgttctgttggccaggctggagtgcactggcacaatctcggttcactgcaacctccgcctcccaggttcaagcgattctcctgcctcagcctcctgcgtagctgggattacaggcgcacgccaccacgcccagctaatttttgtatttttagtagagacggggtttcaccatgttggttggccaggatggtctcgatctcctgacttcgtgatccacccacctcggcctcccaaagtgttgggattacaggcgtgagacactgcacccagccctctcttaatttttttaatatacagatagccagttctttcctgatttgtaagtttttatttaaaccagagttagaaaaataattaaaataacactacctctaaacactcaaaaccactgctatgacataatcctgccatttcagtagaacagaaaatccccacgccttcccctcagctcggagggcacaggactgggcagcaagctccaccagtttgtagaaggagttcaacttccagacagcagggaaatgcctttctctgaagttattacatgagttcacactgaagggaaagaagaaagtgagccttatcattttcccaagatgctgtgagatgtgttggatttactctcactcataattgtgcaggatggttgttttgttttgttttgaggcagggtctcactctgtcacccaggctggagtgcagtggtgtggtctcaattcactgcaacctctgcctccagggttcaagcaattctcctgcctccgcctcccgagtagctagagtcacaggtgtgcaccaccatgccttgctaatttttgtatttttagcagagatggggtttcatcatgttggccaggctggactccaactcctgacctgaagtgatccgcccccctcaacctcccaaagtgctgggattacagacgtgagccactgtgcctagccacaggtatgttcgggatggtttcaaccaacatcaatagaaccaactaagaatagatggccttcagcaacacagaggggtagcacaggagttccaaagatcagtagtttgaaaatcaggtcacagggagtccacgctatatgatcttggggtctcactttgtggcccagctggaataccgtggtgcaaacacggttcactgcagccttgacctcccaaattcaaagatgaggtttcaccatgttgcctaggctggtctcaaacttctaacatcaagcaatctgcccaccctggcctcccaaagtgttgggattacagctgtgagccactgcacccggcaaataatctttttaaaacagattgtgattccgcaggtctgaggtggcgtctgagattctgcattcctaataggcttccagagacagcatctcaccatgatgcccgactagccttgaactcctggcttcaagtgatcctccccattcggcctcccaaagcgctgggattataggtgtgagccaccataacaggcccaaaagtaacatctgatcaaaaatctcaaggtgatgcgggaacaagccatgaggctactcagggaaacgtgctctaaatagaaggaataacaagtacgaaagccctgatatgcgagctaaggtgctcagggacaacaaacaaagccaatatggttggggtaaaacaagcaagggagagaagagaagcagataaaataagagttacaaagcagttcatgtgggactttgtagacgagtataaggactgtggctttttcagtgaatgagaataactggcaggttctgagcaaggagggatatgacctgattaattttaaatggataatgtaatcgtgtttaaactcaaaaagctgaattaaacacctgttccatctc

SEQ ID NO: 2139 - DNA, 1714 bp, Homo sapiens
atcagcgggcacggagccggaagtgttgtggccgccgccgccgcgcgtcgcggaggcacgtgtggagccccggcagcaggagcgtcgcaggtccttggcccttgccagacattagcaccatgagcttcgtggcatacgaggagctgatcaaggagggtgacacggccatcctgtcactgggccatggtgcaatggtggcagtgcgtgtgcagcgtggggcacagacccagacccggcatggtgtcctgcggcactcagttgaccttatcggccgccccttcggctccaaggtgacgtgcggccgaggtggctgggtgtatgtgctgcaccccacgcccgagctctggacgctgaacctgccgcaccgcacgcagatcctctactccacagacatcgccctcatcaccatgatgttggagcttcggcccggctctgtggtctgtgagtctggcaccggcagtggctctgtgtcccacgccatcatccgcaccattgcacccacgggtcacctgcacacggtggagttccaccagcagcgggcagagaaggcccgggaggagttccaggagcaccgtgtgggccgctgggtgactgtgcgcacccaggacgtgtgccgcagtggctttggcgtgagccacgtggccgacgccgtcttcctggacatcccatcaccctgggaggccgtgggccacgcctgggacgccctcaaggtcgaaggcgggcgcttctgctccttctcaccgtgcatcgagcaggtgcaacgcacatgccaggcgctggcagcgcgcggcttctcagagctgagcaccctggaggtgctgccacaggtctacaacgtgcgcactgtcagcctgccaccgcccgacctgggcacaggcacagatggccctgccggctccgacaccagccccttccgcagcggcacgcccatgaaggaggccgtgggccacaccggctacctgaccttggccagaagctggggtgagctgacccagaatccctgccctgctctccccagcgctaggagaccaggccagcccaggaaccagggaggtgaccctgctctctggcctcctggctgatgtcacagcactgagctcagcccaggccttcgtccactcatgtccaagaggcggggcatcccccacccagccagagcccctgacatgggctgcactcgctgaggccaggcagcgctgcggagaggagcggcagagtgggttgtctgccgcaggcaaccaggcaagtgtgtcggggctggggtgtgaatgccagcctgtgagtcccggaactatgtgggtacccctacccctcacagaagccaagggcatggaggaggtccctccacagtgacaacggtgtggggtaggggaggtgcattcaggacaccacccagggacagtgcctatgtgatcacctcttaaaggctaagcttaggggcatttcccaaagtggggacagagggcaggacgcccaggctgggggctctcctcgcccgccctggtgtctgacagcctcaaggaaggagcagtgcctgtgtcagccatggggcccttggagctgccactggtgcctagggggcctgggtttctgcccaggcagccagtggctgttgggagcctctgtttcccctgtgctgggggccttgagtgctatgctagcaggggcctggccccaagtgtgagtgatgagcaataaacgtaccgtccccctc

SEQ ID NO: 2140 - DNA, 1726 bp, Homo sapiens
atttgcaaagagattgctttgtcctgaatttcactctagaaattgcagaaaccaagacttccacgatgtctattaaacagatggtatacggcttcaggagtctcgaatcccacgggcgtacggcttcaggagtctcgaatcccacgggcgtacggcttcaggagtctcgaatcccacgggcgtacggcttcaggagtctcgaatcccacgggcgtacggcttcaggagtctcgaatcccacgggcgtacggcttcaggagtctcgaatcccacgggcgtacggcttcaggagtctcgaatcccacgggcgtacggcttcaggagtctcgaatcccacgggcgtacggcttcaggagtctcgaatcccacgggcgtacggcttcaggagtctcgaatcccacgggcgtacggcttcaggagtctcgaatcccacgggcgtacggcttcaggagtctcgaatcccacgggtgtacggcttcaggagtcttgaggggctcctttgagttgagagttgtggatccaagtctcagagcactgaagttttgtggcagagaagaacttgttatggtcccttccaatagagttcaaggacagtctttctctggtgtcatttccaaaggactcaatcgctgagttttggactctgagaaatctagttgtcatctgctggtgggtcatgaaggccccccctttttttctttttctttttctttttctttttttttttgagacagagtctcacttgatcacccaggctagagtgcagtggcgtgatcttgactcactgcaacttctgccacccaggttcaagcaattctcctgcctcagcctcccaagtagctgggattacaggcgcctgccaccacacctggctaatttttgtatttttagtagagacgggatttcatcatcttggccaggctggtcttgaactcctgacctcgtgatccgcctgcctcagcctcccaaagtgctgggattataggtgtgagccaccgcgcccggcctgcctttttttttttttttgttaacctagtgaaagtatgctttggcataatgcattaaagccttgcactactgaatcatagcagagtttataagagtagaagatacatgaggttctattcttaggggcataggccttccagtgactgtttcttttctttctttcttttttttttgagatggagtctcgctctgtcgccaggactggagtgcagtgacacgatcccggctcactgcaacctccacctcccaggttcaagcaattctccttcctcagcctcccgagtagctgggactacaggcgcgtgccatgacacccagctaattttttatttttaatagagatggggttgaaacccccatgttggccaggctggtctcaaactcctgacctcaggtgttctgccctcctcggcctcccaaagtgctgggattacaggcatgagccaccatgcccggcccagtgactgtttcataaggggtcaagttacattttccactgagaggggaatctgattgccatcaaggccaatggtaatactgttagccaaggcaatccagtcaattcacttaactttgccagtttcagttccaagatgccatttgtcctttcaacctttccagaagactaaaggtgatagcaacaatggtaatgccattgtgtttgtaacactttattttattgctttataactttccgagtaaaattggtatctctgtc

SEQ ID NO: 2141 - DNA, 2326 bp, Homo sapiens
atcggtgagtgactgttgggccccactgctgcgactctccaagtatgactctttctcaagccggtctaccagcagctcaaaggtatctgcagacaccaaactgtgcccatctactcgccgtttttcattcaccatgtccagccaggcaaggtcctcctcatccatgtcatactctacctctgcatccaggtcttcaggtggcttctcaatgtagcggtagtaggcagcaggcagcgggggtgcttctggctggatgcctgagtccaccatacggaagctgggctgtgggaggtggaaggaagtaccagatgcatgcttggagcaggattccttctttttgcccttggatgagggtttcttggacttgccagggaactgaggctgttcactgttttccttgttactattgcattcggtgatatcctgggcagttagctcatcttcagtaatgattttgagtgggtcatagatgctgatacgatgcaggcgtccatcaatgtctacctcgacaatccgctgggcctgggcatatgtcagggtctcccgggtgggtgagcacttgagactgtagggggacggggaacgccggccctcggcattctgccgggacttccgacgaggcttcctcatggcacctgggaactgaggggacaggcctaaggagagaaggccaggagactatgagttggatgcccttatgcacccattcatcctcccatatgatcaagcatccaccaagaggactggcttttccctctgtctgaacaacttgcccctcaggcatccacatggcttgctccttcacttcctttgagtctttcatttcttcaagtgaacaacacttctcagtgagaccttctctgaccactttatctaaaattgcaaatccttttcctccaccagcaatctacctttcattctgctttatttttccctttaacattcatcatcttataccatgctacataatttacctactactatgtttattgtttccttccttccactagaatataagctccatgaggggaagaatttttgtttgtcttgttcactgctgcatccccagttcctggagcagtgcttagctcctaagtaaccactcaataagtattagttgaatgaaagaagaaatcaaacacacatgatccctgccctcaaggagccctgtctaactcaaaagacagaaaagtaaacagattattacagtgtaacatggggaaagatctaatgttctaatgatgtacataaagctgggcgacagctaactatggaaaacacatgtagttaacggtttagaaaagaaaacaagaaaagcatccactgtcaagctctgtacgtgaacaatgggccccatcagaggatcaaaagtcactagagtcttctcccaatacctcttaccacgatcagaaaccctactccttgaccctgcctagaggtgaaggggtgaaggcatctgaaatatctatgatacatggtctaagggcttcaaactacagtatgcagggtattccctacaaaagacaccatccaggacagcggtccccagcctttttggcaccagggactggtttcgtggaagacaatttttccacagatgagggtgggtggtgaacactgttccacctcagatcatcaggcattagtcagattctcataaggagcatgcaacctagatccctcacatgcgcagttcacagtagggttcgcgctcctatgagaatccaaagcagccgctgatctgacaggaggcagagctcaggtggtaatgctcgcttgcccgccactcacctcttgctgtatggcctggttcttaacaggccacagtctgcggcctgggggttgggaacccctgatccaggatacaccaactagtacatttccaggcagaaacaaaccctagaagctctgagagtggctccaagagatctctgaagttatagtggcctgtctaggaccttcattcgaccgaaggccaagatgatctgggcagtatctgaggtaaactctcaatgcattctgttacctcaaaagtctctcccagaacactcatatctagtctatccttgtacagccaagagaaagtcctagtttcccccatcattctctggatgacaagctcataaggagctgcggtaggcagttaccaaggctgtcaccaccaggagagacctttggggatacagggccccatggtgtgggcagacttggaaggatatgaacaaagagaagatttcaaagagaaaaacaattcatcgccttggttgcagggtctaccatctatataaagtagagacggtgataataaaagcactttttccaaact

SEQ ID NO: 2142 - DNA, 1696 bp, Homo sapiens
atgcattctgtccacagcatggaggcgccgccacctgcccgctgccgtcagcacaggcacctgggctcgtgggcatttcaggtcagcatcatccatggatcacaaagtgctgattctctgacaagcagaaggcaggcgcccaggtgctccgttagccaaagggaggctccagtgccgaagacaggcagacggccatggcgcacacagaccacggtgtacacaggccacggtgcacacagaccacgacacacacagaccatggtgtacacaggccatggtgcacaaagaccacggcgcacacaggagccaagaaaatgttcatgaagctgcgagcaggaaagcgcggatttccacgtggagaggaccttgtccatggtgatgccgatgtgtggggatcaccgtcagtgcgttgcttgtaggaaggcagctgagattttactctgggttgggtatttttaaattcaaattggccccctgcattttccctctatcctcactgggaaatagaggaacgccttgttgggtgcccaggctgccctagctcagcacctctgaactttcctttcatatcatcttcccaatgttgctgtatctaagaggctgatctttttgttatttgctgtatggatttgtttgtctaaatcagcttactcctacctgtcaggtgggtgtgtgctgaggaacaagaacccaggctgatcccagacatgcagctgtgtccctgggcgggagctggacacctgcgggctctgccccacgaaagccctgtcctgtagcccatgccagcccatgccagctcctgggtcctgggccacagactcctccagctcagttgccgtcagcccgaacgagggagatggggctgtcgggttagaagcctcatggccacaccagccgtcggcctcccaggctgtcttctcctcatcacagggacgagatgacagtgggagccccacggaccggaccccatttctgtgtcagggcagggccaggaggaaaccacacaggaattccagcaaagaatttaaaaaaatgtatcgtggtacaatatgtgtcacataaaatgtgccattttaaccatttttgctgaacagttcagtagcgttagctacgtgtacaaagctgtgcaacgctgaccaccatctacccggaaaaactttcatctctccaaacagaaactctgcctcatgggactgggcatatggttcacgcctgtaattccagcactttgagaggcagaggcaggaggatcaggagcccaggagtttgaggttggcctggacaacatggcgagaccccacctctacgaaaaataaatagctgggatcacaggcgcccaccaccacacctggctaatttttgtattttcagtagagacgggatttctccatgttggccaggctggtcttgaactcctgaccttgtgatccacccaccttggcctcccaaaatgctaggattacaggcatgaaccaccgcgcccggccgcattcttttctttatttcaccataagaaatctttaaaatggatactgttataaccctcattttccagatgaacatacaggcccgtagtgtttaaatagcttaaaaaaatttattttttttatgatgaggtgatgggttgatgtgtgcagcaaaccaccatggcacacgtttacctatgtaacaaatctgcacatcctgcacatgtact

SEQ ID NO: 2143 - DNA, 1957 bp, Homo sapiens
gtccgaagggagcggagcgcagcctggcctggggcccggtcgagcccgcgccatggcggccgaggcgacagctgtggccggaagcggggctgttggcggctgcctggccaaagacggcttgcagcagtctaagtgcccggacactaccccaaaacggcggcgcgcctcgtcgctgtcgcgtgacgccgagtgcagcccgaggagctgagggtttaccccgtgagcggaggcctcagcaacctgctcttccgctgctcgctcccggaccacctgcccagcgttggcgaggagccccgggaggtgcttctgcggctgtacggagccatcttgcaggtgagggggttgtgagcgccgcagcaccagtggctttagggcctgtcgcttacgcgatgcgggtagtattgttcccgttgcgcagttgaggacaccgaggttcacggtctgagtaacacctcattacaccgaagcctgggcctgtattcccagagctttgggaggctgaggcgagaggatcacttgagcacaggagttcgagaccagcctggacaacatagtgagacccccatctctaaataaaaatagaccaacgctaaagcctgtgctccagagcctccaggcaattggatcagaagtcgcagctctggtgggaggaaggcgagccctcatgtgtgtccctgtgccactttgccttggcccctttgctgtccatcctttttcagggcgtggactccctggtgctagaaagcgtgatgttcgccatacttgcggagcggtcgctggggccccagctgtacggagtcttcccagagggccggctggaacagtacatcccagtacgggcccagtcctaccctctcctccccaaggcacctccaccccctaaccctaccccagtgcccaatgtctgcctccacatccctcaccccaagtagggaatttcccccaaaaccctgacttcccctcattgccccagcccttcccactcctgccccagccccatcaccaccctgatagcttcctgggtgcagagtcggccattgaaaactcaagagcttcgagagccagtgttgtcagcagccattgccacgaagatggcgcaatttcatggcatggagatgcctttcaccaaggagccccactggctgtttgggaccatggagcggtacctaaaacagatccaggacctgcccccaactggcctccctgagatgaacctgctggagatgtacagcctgaaggatgagatgggcaacctcaggaagttactagagtctaccccatcgccagtcgtcttctgccacaatgacatccaggaagggaacatcttgctgctctcagagccagaaaatgctgacagcctcatgctggtggacttcgagtacagcagttataactataggggctttgacattgggaaccatttttgtgagtgggtttatgattatactcacgaggaatggcctttctacaaagcaaggcccacagactaccccactcaagaacagcagaggcaaagaaaggtgagaccctctcccaagaggagcagagaaaactggaagaagatttgctggtagaagtcagtcggtatgctctggcatcccatttcttctggggtctgtggtccatcctccaggcatccatgtccaccatagaatttggttacttggactatgcccagtctcggttccagttctacttccagcagaaggggcagctgaccagtgtccactcctcatcctgactccaccctcccactccttggatttctcctggagcctccagggcaggaccttggagggaggaacaacgagcagaaggccctggcgactgggctgagcccccaagtgaaactgaggttcaggagaccggcctgttcctgagtttgagtaggtccccatggctggcaggccagagccccgtgctgtgtatgtaacacaataaacaagcttcttcttcc

SEQ ID NO: 2144 - DNA, 1846 bp, Homo sapiens
ctactggccagccctgcaaaacgtttacaccaacgtcactgaagggctgaaggaagccaacgacatcgtgctctatttgaaacccctacggatcctgctggaggagatggaacaagccgacttcacgatgctccccaccttcattgccaaggtgctggacaccatctgcttcatctgggccacctctgagtactataacacacctgccaggatcatcgtcatcctgcaggagttctgcaaccaaatcatcgagatgacacgaaccttcctgagcccggaagaggtgctgaagggcctgcaaggtgaaatcgaggaagtcctgagtggcatctccctggctgtaaatgtgctgaaggagctctaccagacgtacgacttctgctgcgtgaacatgaagcttttctttaaggacaaagagcccgtgccttgggaattcccttcttctcttgccttttccaggataaattccttcttccagcgcatccagaccattgaggaactctataaaacagcaattgagtttctgaagctggagaaaatcgagcttgggggcgtgcgtgggaacctcctcgggagcctggtgacccgtatctatgatgaggtctttgagctggtgaaggtttttgccgactgcaaatatgatcccttggaccctggagactcgaattttgaccgtgattatgctgattttgagatcaaaatccaagacctggataggaggctggccacgatcttttgccaaggatttgatgactgcagctgtatcaagtcctccgcaaagctcctgtacatgtgtgggggcctcatggagcggcccctgattcttgccgaggtggcgcccaggtattcagtcatgctggagctgtttgacgctgagctagacaatgctaagatcttgtacgatgcccagatggcggcctccgaggaggggaacatccccctgatccacaaaaacatgcctcccgtggccgggcagctcaagtggagcctggagctgcaggagaggctagaggtgtccatgaaacacctgaagcacgtcgaacacccggtcatgtctggagcagaggccaagctgacctatcagaagtatgacgagatgatggagctgctgaggtgccaccgcgagaagatctaccagcagtgggtggcgggcgtggaccaggactgccactttaacctggggcagccgctgattctgcgggacgccgctagcaacctcatccacgtcaacttcagcaaagcgttggtggcagttctgagagaagtcaagtatttgaatttccagcaacagaaagagattccagacagtgcggagagtctgttctcagagaacgaaactttccggaagtttgtgggcaacctggagctcatcgttggctggtataatgagataaagactatagtgaacgcagtagaatttctactaataaagtcagaactggaagcaattgatgtcaagttattgagcgctgaaacgacattattctggaatggcgaaggtgtgtttcagtacattcaagaggtgcgagaaattctgcacaacttgcacaacaggatgcaaaaggcaaaacaaaatatagaaggaatttcccaggctatgaaggactggtcggccaacccgctgtttgaaagaaaggacaataagaaagaggccctgttagacttggatggaagaattgccaacctcaacaagcgctacgcagcagtcagggatgctggagtgaagatccaagccatggttgcagtaaggaaacacccaggaggttttttgagaacccacttgcttttagcagggaggagagagtaaacccagggctggagatttcataaaaatgattagtgacac

SEQ ID NO: 2145 - DNA, 2600 bp, Homo sapiens
ttaaatggtttgtaaccaatgtttgatttgtcaaatccataattctggtaagacaataaaaacttcaggtgatacatttctagcacctgttggatatttgaacacttacagatggattttcttcagttgccactttccatgcatgttttctgcttgcctaaaagattttccatgcaggaaggctaatgctataacagtagctaaatgcttactagaacatatgttttccttatggggcattcctggagaattttccagtcatagaggtactcatttcactggacaagttgtaaaacagttaagtaaggtattacaaacacaatggtattaagcaaagctaatagaatcaattgtattaccttggtaaaaggtactactgactgatggcaatcagacctacccttagtggaaaatacagattaactccttatgaaatagctactggaaggcctatcctcctaataatagaagctcacatgtctcctgctcttacaaactctgacatgacacagtattgcaaggctttaatgcattatgccaaagtactagagaaagattgcccttgaactccattgaagggatcatcctaagtttttctctgtagcaaaattttagggcctcgagtcttggatccttgagttgtggggcttctctcaactcaaaaaggcacctccagactcttacaggctcactggagacctcaaggtaaaactgaccggagaggtttctcttcagaagcagatggcatcctagatgttgacagctttcccaaaatcacagatcatcaagacttctctcttctgtcaccgtaagatctttgtcctctttctccttgtatttgttttctgtttatatgtggcaagataatgtgataactaagatttcataattgatagcttctgcagggaacttaactgaatgctgggcagatcatgttaaatctaaattattatgtgaccttagagattctctggttcaccctgtaacaaatttcactgatattccaagtgtggctatctgttcaaattgctcatctggtcctttatgtagggttaggtttttagatttatgggttcagatcccctgtttaaatctaagagtagacaaaatctataatgagggttttgcagtaaaattatgccagaaattgactgagaaaaccaaagtaaagataattcaacagtttgtagacaaattaataacattaatcccttaattgtcagtagcctccaaccatgcaatgattcaataatggagccttagataaatattactagtgcttccctactgatgactcttaatgcataagacatcccacagggatctgtctgttgtgcccctctaggatatatttttatctgtgcaagatttaataacaaccatatgtgtgggcaagttcatgtctcaataattaaaaaataaaaaggaccaatgtggattaaggatcctaataatagtgtcactccataaccaattggaaacttcacattggtctaaacctcgtaatttgtagtatgaaataaagaggaatttgccagaaggtataaatgcctctaaatgggcatcttttggcagaatactcctttcttggtttggtataaatgtaaataaagtttgattagaaatctatgttaaacattagctactatagctgactctactgaaaaggatatagttatccagcaaacttctttaaattttcttgcttgagttgttttagataacataattgctttggactatctgttggctgaatggggggagtgtgtgtgatagctaacacctcctgctgcacttggataaatacatctggtatggcagaaactccgttgcaagaaatcaacaaacaagctacttgattaaaacaagtagattccttttctggttcatttttgatatatttgattttgaccagttcaatctgtgggggcccctgttaaggaatatacttcaatctctcagcattattttctgataaccatcataatagtctccctgaggatatgtgccatatcctctcaggaggtttaaatgttcatatgtagccatccgttgtatgtcaaatggtctcactacagttagaaaaacaaaaatatgaagagaatataaagagtcatccaagtgacttgttgttgtgaagtatgaatctcatactgagaacaaacaaccattgttatggtgacagagggtggcatcaatgcccaaggttttggtcaatctctcaaaatggagaaggagaccaaagaggggaaattgttttaaattaattttggcttaaagctgtttctgtatgtaacaactgcaacctaacttaagagtatattcttgtgataagtagctgagtctcagccaatcatagcagctgagcttcagccaatcatagcagctgagcttcagccaatgaaaggttgccgactgatcagaccacgtccatataaggcaaacgctgagctgtaaccaatcaagctgtttctgttgtcactttatttttctgtctgtaaatatgcctgcccacattgctgggtagaggaggttctaagtgcttcccaattcataaattgttctctgctcaaataaactctgctaaatttaaaaaaaag

SEQ ID NO: 2146 - DNA, 2306 bp, Homo sapiens
agagttttcctgctccccgcgctcgggtggcgggggcgggtctgagtggtaccccggaggagaccctttgaaggtcccttgtggggactggaaagaggacgaagtcttgctttgttgcccaggctggagtgcaatgacacagatctttgctcactgcaacctccgcctcccgggttcgagtgattcttctgcctcagcctcccgagtagctgtgattacagggtctccgtctctccaccgggggcttcatccttccagggaggagaagagggactccagaatggctgaggagaagaagctgaagcttagcaacactgtgctgccttgaagttcatgcacatggggaagcggcagaagctcaccaccagtgacattgactacgccttgaagctaaagaatgtcgagccactctatggcttccacgcccaggagttcattcctttccgcttcgcctctggtgggggccgggagctttacttctatgaggagaaggaggttgatctgagcgacatcatcaatacccctctgccccgggtgcccctggacgtctgcctcaaagctcccaaagagcaacagaaggctgaagccacagaacccctgaagtcagccaagccaggccaggaggaagacggacccctgaagggcaaaggtcaaggggccaccacagccgacggcaaagggaaagagaagaaggcgccgcccttgctggagggggcccccttgcgactgaagccccggagcatccacgagttgtctgtggagcagcagctctactacaaggagatcaccgaggcctgcgtgggctcctgcgaggccaagagggcggaagccctgcaaagcattgccacggaccctggactgtatcagatgctgccacggttcagtacctttatctcggagggggtccgtgtgaacgtggttcagaacaacctggccctactcatctacctgatgcgtatggtgaaagcgctgatggacaaccccacgctctatctagaaaaatacgtccatgagctgattccagctgtgatgacctgcatcgtgagcagacagttgtgcctgcgaccagatgtggacaatcactgggcactccgagactttgctgcccgcctggtggcccagatctgcaagcattttagcacaaccactaacaacatccagtcccggatcaccaagaccttcaccaagagctgggtggacgagaagacgccctggacgactcgttatggctccatcgcaggcttggctgagctgggacacgatgttatcaagactctgattctgccccggctgcagcaggaaggggagcggatccgcagtgtgctggacggccctgtgctgagcaacattgaccggattggagcagaccatgtgcagagcctcctgctgaaacactgtgctcctgttctggcaaagctgcgcccaccgcctgacaatcaggacgcctatcgggcagaattcgggtcccttgggcccctcctctgctcccaggtggtcaaggctcgggcccaggctgctctgcaggctcagcaggtcaacaggaccactctgaccatcacgcagccccggcccacgctgaccctctcgcaggccccacagcctggccctcgcacccctggcttgctgaaggttcctggctccatcgcacttcctgtccagacactggtgtctgcacgagcggctgccccaccacagccttcccctcctccaaccaagtttattgtaatgtcatcgtcctccagcgccccatccacccagcaggtcctgtccctcagcacctcggcccccggctcaggttccaccaccacttcgcccgtcaccaccaccgtccccagcgtgcagcccgtcgtcaagttggtctccaccgccaccaccgcaccccccagcactgctccctctggtcctgggagtgtccagaagtacatcgtggtctcacttcccccaacaggggagggcaaaggaggccccacctcccatccttctccagttcctcccccggcatcgtccccgtccccactcagcggcagtgccctttgtggggggaagcaggaggctggggacagtccccctccagctccagggactccaaaagccaatggctcccagcccaactccggctcccctcagcctgctccgtgatgctccacctgccagcccccggattcccacacatgcagacatgtacacacgtgcacgtacacacatgcatgctcgctaagcggaaggaagttgtagattgcttccttcatgtcactttctttttagatattgtacagccagtttctcagaataaaagtttggtttgt

SEQ ID NO: 2147 - DNA, 2914 bp, Homo sapiens
aagttctcagagggtgagggtcccacatctcctgcaggacaggccctagctaccgagtcacagaaacccagggccgaagcaaagtcccaatcccagagaggctggggcacacctacaactgaaaggaggcttagaaatccttcagagaccaccctatcggttctcctccacctggacaggatgagccagcaacacagaaggaagaggccttcctccgaaaggtatatttgtaagccgagttgaatgctttgtggagagagcccctaaaatggagcctggcagataacaagcacgagataaacaccagctgactccacggatggagggcacactcccatgctgtcaccctcaggaagcatcatgacagcttgatgctggcagcaactgtccatgaagaggggaagagtgacaatgcaggaaagagaagaagactcaagacacaaagtcctcagggggcgagggtcacctccttctaccaggtcagagaccaccctatcggttctcctccacctggacaggatgagccagcaacacagaaggaagaggccttcctccgaaaggtatatttgtaagccgagttgaatgctttgtggagagagcccctaaaatggagcctggcagataacaagcacgagataaacaccagctgactccacggatggagggcacgtggacggactgggtatgcagaagagactctctgactgcagactcggctgccacacatagaaatgtctgctccctggaccctcagactgcctcggtccctcccccgtgaaacccactccaccatttccacgcacactcccatgctgtcaccctcaggaagcatcatgacagcttgatgctggcagcaactgtccatgaagaggtggtggttgaaaggtgagaattggaatataatttccatccagggaaggaagtgtcccctttagagtaacaacaccttgggcacaccattaacaaatgacagacttgggctctgctgctcagagaactgaagtcagaggatagcacatgcattcttagctgagaagttcataagagctataagaacctgtgtgatgtttcctggaaagtactcgggaacaggaatcaggaaacctgagtttgagtccctttcttgccaccaaatccatcatcagatgacacttgaacatgcctctcaaaggatgagattaggcaagatcatctctctaccaaaccctcttctcccacttcccaagaagagagattgcctggccctgcttgaatgtcatgaacaggtgtgctggggggtctagtctggaccaggtagctcccaccaggacagagctgccaactgcacatggagaccctgaagcttttttggcctttaaccagctcctgagctgctgcaactcacagagaaaggaaatagcataatgggccaatgacaagttatataatttggttgaaacttcaaacaacaggacccatatggataggaaattattttaaatggactcaaatgtctaatttacataatctatgtttcttgttcatatttgcacccagtgggtggttatatgaatatttgaatacttgatgactgattaatagaatataatttgccaggacccttcactgttgagaagggtttgaacgaactgcctttttttttcttaccccatatatggaagaaagtaaaaaagtttcagaatgagtttaggataattatactacatcttaaatgtttacatttaccaaaacgacacacaaacgcaacacatcttatgtataagcctcatttggagtccgtgtccaaggtcctctgtgaggtccttggtgaccctggtcctgacattcatcctcccctacatgtcagggtctgttatttacatcttacagtttggctacaaatcctccagctaaaactcttaccagatcggccatcagaagaccaagcatgactccccaccctcaactttgttcctccctcaacgcgtcactttgggcagcgtattccctgggcctggaaaaggaaaggattgcctttcgatgaaccccagcaacgtaactaagttcacttttgactcctgataggctttttcatcaagaattttaatttggcttcttcgtcaagaattttaattccacacacaccacagagctggttttatagaggtcaatctaagccttcggtcaaattttctccccctcatccccatgaacagccttgctttgcctctttctctcaccacatctatagcaagtccactgtgggtcacggcagctccctgcagatattggatttgtggtgcagagggggacgccctttctgagagtgagacagaagggacagggtgggccagcctcctgcaaagactccatcagacaggtgcaaatgcatgcccaagaaggatggcagggaggccacatgcagcaccatcacgctttatcatgatgggtccatggcccttcctcccaggggacctagccttgggagatttgcgaaaaaagagagtcacaaatatgcaaagtttcaccgtgaaatgggcattgggcttgccagggctggccttggtagcatccttccatgtccccttcccctgggttgcaagaaccacgtgcttgcccaagtctttatatcactggggaataacttgactccttcttctctttcaatctctctcaatctctctctctctatctctgaaagcaagtaatggcaatgagtcaacagaaatactgtaggtgacctgtctgagaggccccaggcctctagtgtgggcaagggacatgaagcctgaagtttttatctatttgcacgttccctagagaaacaggaggaaaattatgccagagatgtctcacagcacatatgtactttacagtagataaaattgtttaaaatctcatgaaaaatggctcaaaatataagtttacatggttg

SEQ ID NO: 2148 - DNA, 2237 bp, Homo sapiens
gactgccatgcaatgaggactgaagcagctctgtgaagatgtccatatggagaggaattgaggtcccaaaccaatagccagtaccaggtgcccggccatgtgatgaatgaaggggattcaagccttgccaccgacttacaggaagatgtagaggaaaatcctagtccaactgtggaagagaataatgtggtagttaaaaaacaggggccaaatttacataattggagtggtgactggagcttttggatttcaagttccacctataaagacaggaatgaggaatacagaagacagttcacacatctacctgatacagagaggctgatagcagattatgcttgtgctcttcagagggacattttgcttcagggacgactatacctttcagaaaactggctatgtttctatagcaacatcttcagatgggaaactacaatttctattgctttaaagaatataaccttcatgaccaaggaaaaaactgctcgactcatcccaaacgctatccagatagttacagaaagtgaaaagtttttcttcacatcttttggtgccagggatagaagttacctcagtatctttaggttgtggcagaatgtattattagataagagcctgactagacaggaattctggcaactgctccagcagaactatggcactgagctaggtttaaatgctgaggagatggaaaacttgtcactgtcgattgaggatgtgcagccaagaagtccaggaagaagcagcttggatgactctggggagagagatgaaaaattatccaagtcaatcagttttaccagtgaatcaattagtcgggtttcagaaacagagtcattcgatggaaattcatcaaaaggaggattaggcaaagaggagtcccaaaatgagaaacagaccaaaaagagtctcttaccaactttggaaaagaagttaactagagtgccatcaaagtcactggacttgaataaaaatgaatatctttctctggacaaaagcagcacttcagattctgttgatgaagtatgcagctgggcatggattagtcatacgctgtttacctgaatttaggactttaggaagatctactctggcccccagtggccaaatagaaaatgttcctgagaaagatcttcatggaagactttttatcaaccgtatttttcatatcagtgctgacagaatgtttgaattgctctttaccagttcacgctttatgcagaaatttgccagttctagaaatataatagatgtagtatctaccccttggactgcagaacttggaggtgatcagctgagaacgatgacctacactatagtccttaatagtccacttactggaaaatgcactgctgccactgaaaagcagacactgtataaagaaagtcgggaagcacgattttatttggtagattcagaagtactgacacatgatgtcccctaccatgattacttctataccgtgaacagatactgtatcatccgatcttcaaaacagaaatgcaggctaagagtttccacagatttgaaatacagaaaacagccatggggccttgtcaaatctttaattgaaaagaattcctggagttctttggaggactatttcaaacagcttgaatcagatttgttaattgaagaatctgtattaaatcaggccattgaagaccctggaaaacttactggcctacgaaggagaaggcgaaccttcaatcgaacagcagaaacagttcctaaactttcctctcagcattcctctggagatgtgggcttaggtgccaaaggggatattacaggaaagaaaaaggaaatggaaaactataacgtcactcttattgtggtaatgagtatttttgtgttgttattagttttgttgaatgtgacactgtttctgaagctgtcaaagatagaacatgctgctcagtccttttaccgtctccgcctccaagaagagaaatctttaaatttagcctctgatatggtgtcaagagcagaaactattcagaagaataaagatcaggcccatcgtttaaagggagtgctccgagactccatagtgatgcttgaacagctgaagagctcactcattatgcttcagaaaacgtttgatctactaaataagaataagactggcatggctgttgaaagctagtgatctgaaggactaaaaccgcagagatacttggaacttaaagaaaatacctggaagaaaaccagacgaatgaaggattttggcatag

SEQ ID NO: 2149 - DNA, 1770 bp, Homo sapiens
agagccgggcggcgcctcagctgcactgcgcggagttggcgcggcccgggaccaggagctgagcaaaccgccgcggccaacaggaggcgtcactcggacccgggctcggcgccggggtgtcgcgcggcggcgggcgggcaggctttggagcggcggttttttcggaaagtgcttttggccgggagtgccgcagaaccccagcgtcacgaggatttttagactctgaggagcagttggagctaatccacattatggaaatggaaaccaccgaacctgagccagactgtgtagtgcagcctccctctcctcctgatgacttttcatgccaaatgagactctctgagaagatcactccattgaagacttgttttaagaaaaaggatcagaaaagattgggaactggaaccctgaggtctttgaggccaatattaaacactcttctagaatctggctcacttgatggggtttttagatctaggaaccagagtacagatgagaacagcttacatgaacctatgatgaagaaagccatggaaatcaattcatcatgcccaccagcagaaaataatatgtctgttctgattcctgataggacaaatgttggggaccagataccggaagcccatccttccactgaagctccagaacgagtggttccaatccaagatcacagctttccatcagaaaccctcagtgggacggtggcagattccacaccagctcacttccagactgatcttttgcacccagtttcaagtgatgttcctactagtcctgactgcttagacaaagtcatagattatgttccaggcattttccaagaaaacagttttacaatccaatacattctggacaccagtgataagctgagtactgagctctttcaggacaaaagtgaagaggcttcccttgacctcgtgtttgagctggtgaaccagttgcagtaccacactcaccaagagaacggaattgaaatttgcatggactttctgcaaggcacttgtatttatggcagggattgtttgaagcaccacactgtcttgccatatcattggcagatcaaaaggacaactactcaaaagtggcagagtgtattcaatgattctcaggagcacttggaaagattttactgtaacccagaaaatgatagaatgagaatgaagtatggaggacaagaattttgggcagatttgaatgccatgaacgtgtatgaaacaactgaatttgaccaactacgaaggctgtccacaccaccctctagcaatgtcaactctatttaccacacagtctggaaattcttctgtagggaccactttggatggagagagtatcccgagtctgtcattcgattgattgaagaagccaactctcggggtctgaaagaggttcgatttatgatgtggaataaccactacatcctccacaattcattcttcaggagagagataaaaaggagacccctcttccgctcctgttttatactgcttccatatttacagacacttggtggggttcccacacaagctcctccacctcttgaagcaacttcatcatcacaaattatctgcccagatggggtcacttcagcaaacttttaccctgaaacttgggtttatatgcatccatctcaggacttcatccaagtccctgtttctgcagaggataaaagttatcggatcatttacaatctttttcataagactgtgcctgagtttaaatacagaattttgcagatattgagagtccaaaaccagtttctttgggagaaat

SEQ ID NO: 2150 - DNA, 1763 bp, Homo sapiens
tttgtacgtcctgtatttactctggcaaccctacccccaggggacatttggcaatgtctggggttgttactgcggatggggttgtgtgtgtgtgtgtttctttttttctttttacacacccaactaagccatagaatcgcatagaaaaaggtatggaaggtcacatacctaagtcatgtggggtagggagtggtcattccttttactctaaataccttctgcagtgttttattatttgtgaagttaattataactgaagtgaatatatacgtgtatacacacacacacagaaagcatgcctatcaaaacaatagatatttcacaaagtgaacgcacccatggcatggcctcctgatgaagatgaagaacatggccactgctccatgaggccctttgcagtcctgccagcctctccctcgagggctgcgaggggaactgctgtcctgacttccaacctgctttgggctccacatgaaccgaattctgcccgacgtcctcgcttgagactggcgtctttccctcagcaacgtgtcatgattcattcatgtggatcggagcagcggttggatcattttcattgctgtgaaatacaccacaatggatttatgcattcaaccgttgatggacatttgggtcgtttcccgtttggcaagatgatgaagaaagctggtatgagcattctttcacacgtcttttcttgggcatatgtactcactcctgttgagtgtaaacctaggaatgaatcgctcagtcatagggcaaatgtgtgttcctctttcctagataccattcgagttcccaaagtgcttgcacgggtttacgctgccatccaccagagatgaaagttccgcctgggctgctgcctcctggccaagcctggctgggttgtagcttttgcgctttagtccctctggtgggtgtgtaaattgctaatcactgtgattttaattcgcatttccctgatgatgaagctgagcactttttcataactttatgggccatttgattgtcctcttttgtgaaatgcctattcgggccattggtccatttttccatgaggttatctccgtttctctcattgatttgtaattaagagtcctgttgcaaatctcttttcccgctgtgcggcttcttgccttttccttcgcttacaacgctccatgctgtcctggaccctagcatcacccaggcctaggtaatagaagggtggcttttgtaaagcgactcaaggctgagaagggaacagacactcttagcacaataagctacaggctgaaaaacagccggaggtgaatctttgcagcgtgaatggtctggctgtcttttataaaagtaactcgattggactagaccccatgagggactctgctcctccgctcccctttccctgaggacctaattccccactgggtcagccgcagaaccagatagagctggggactcacgacccgtgctgacgactggatgcaagaggaggaaggactttggtggagagaaggaatcaaaaggaaccaagaatgtgagacaagaggacttgctggtggggtcccctgctgtgtccccagagtcccagcatgtgcctgacacacagcaggtgcctgactgatagtgacggttccccaaaggctgctggagtcacctctgggattctgcacaggctccaccctctggggaggtgtgcttggtagaggacacgaaggctgcttgttggggttaccttagtacctgggtgaagagtaaaaagtaattaataataacgaaag

SEQ ID NO: 2151 - DNA, 1902 bp, Homo sapiens
aaaaacgcagtaggaggagtgacgggaaccgggagccggctctatgcgcctggagcgcgcgggtcccagcgcccatcggcccggggtccgaggggcccgctgcccgggctcgctgcgtggtgctaccgcccccgggcccgctgcgccgcgtcggagccccagcagactttgagaggcgtgtgcgacagtgcgcgtcctctcctgcctctggatgtttccttggagcctctggccttcgggaagaccggtaaacgtccctgtggagccagccagccagccacctctgacccccgggctcaagcagccagccgcgtgctccctcctcccacttggtacccggacagaacagtccctaccttgctcttctcccgccggctcgtcactttaggctccctccagattccgcgttccttgagcaaatggctcacccctgacgaatccggccttaaaaaagtcccggccttgaaaggggtggagactggcgggcgggagcgaaaggaggtcagacccatggctggggtcgcacacgcatcacctgaggtcggagaggaggggagcctcacttcctctgacccactgagcctggtggcagcgtgcggagagatgtcaccatcccggactaaatgaaatccaactttccctgacgcaccttgtgggatcaaagaggggtgttcccatgctcacctttcgccacttcctccctggggtatctccacctctccaacacaagctcaatgccagttctctttgggatgtttttgtgcagggggtgtgacctccctcataaaggaacccccactcccaagttttcccctcttgtcagtggaacctgtgaccaacggttccttcctgtccttttcctccctgaaagtagcccgggggcattcgaacatggctctagacccctgaatagggtttggagcggagatgtgcctggggagaagagatcgcagtgctgtgtatgaagctttgggcacgtgctcacaagagcacacacagcaacctgagcaggtcattccttttgataaggatgacaaatacacataccaaaccctgttcccctcacccaccccaaaccagtacccccaggatgattccagatcagctctggagcatttgcatcaagggcctgcagactcacaggacctactagagcaaaatatcagtgtctcagaccccagttttggcctcaaatactgggtttttctgccaggagaagtagctgctagtctaggaaatgctgggacttgtccagaaagatgaggtttgtgaatacggggtgtggggttgggtggggaattaaggctgatgtatctggaggaactttggttgggctggaggcaacttctgccctgttctattcaacagttccctcccctccactaccccatttaatctggccacagctcagctacctgtgtataaaatcttgatctctctcctatttcctttctaccttccgtgtttttacttactcgaaaactgttcccctctcctgtgtgtatttttttaattgaaatataccaggcatttaggaaaggaacacgaaacctaagtgtacaggtcaacaaatgatgacacagtgaacacccccatatgaccaccatccagatctagaacgagatcattattggcatcccagataccctccttctatccgctcctggtgactatgccacactccttctcaaaagtaacgtttatctaacactacaggttagttttgcttacttctgaactttatatacatggaaccattcagtaggtattattttgtgtctggcttctctcactcaatactatgtttatgaaactcatccaaaacattgtggtagcagtagcttatttgttttcattgccgtacggtatgccattaaataaatataccacaatttatctgtt

SEQ ID NO: 2152 - DNA, 2208 bp, Homo sapiens
aaacgggaaaagacttgactggcctagcctcccagcctacatctttctcccttgctgaatgcttcctgccctcaaacatcagactccaagttcttcagttttgggactcagactggctttccttgctccccagcttgcagatggcctactgtggaccttgtgatcatgtgagttaataaaatcccctttgtatatctatctattttattatttctgtccctctagagaaccctgactaatacagtaaattggtaccagtagagtggggcattgccgaaaagatacccaaaaatgtggaaactactttggaacttggtaacaggcagaagttggaacagtttggagggctcagaagaagagagaaaaatgtggaaaagtttggaactccctagagacttgttgaatggctttgacaaaaatgctgataatgatatggacaatgaaacccaggctgaggtggtctcagatggagatgaggaacttgttggtaaatagagcaaaggtgactcttgttatgttgtaacaaagagactggtggtattttgcccctgccctagagatttgcagaactttgaacttgagagagatgatttaaggtatctggcagaagaaatttctaagtggcgaagcattcaagaggtgacttgggtgctgttaaaggcattcaattttataagggaagtggagcataaaagttcagaaaatttgcagcctgacaatttgataaaaaagaaaatcccattttctgaggagaaattcaagctggctctagaaatttgcataagtaaagaggagccggatgttgatccccaagacaatggggaaaatgtctccagggcatgtcagaggtttgcataacagcccctcccatcacaggcctggaggcctagaagggaaaaatggtttcatgggctgggcctagggtccccgtgctgtgtgcagcctagggacttggtgtcttgcgtcccagctgctctagctgtggctgaaaggggccaatgtagagcttgggccatggcttcagagggtgcaaacatcaagccttggcagcttccacagtgttcaaaacatgggagctgtcctgattattattttttcctatagtaatcatattagcccataatgtgtgcacaatgcatatgtgatggttcctgccccacgtggtgttgagcctcccagtgcacagaagtcaagaattgggatttgggaacctctgcccagatttcagaggatgtatgaaaacacctggatgtccaggcagaagtttgctgcaggggcagggctgtcatggagaacttctgctagggcagggcagaagggaaatgtggggttggagcccccacacagaatccctactagggcactgcctagtggagctgtgagaagagggccactgtcctccagactccagaattgtaaatccactgacaacttgcaccgtgcacctggaaaagctgcagacactcaacgtcagcttgtgaaagcagccaggagggaggctgtaccctgcaaagccacaggggaagaactgcccaagaacatgggaacccacctcttgcatcagtatgacctggatgtgagacagggagtcaaaggagattattttggagcattaagatttgactgccctgctggatttcggacttgcatgggccctgtaacccctctgttttggccagtttctcccatttggaatgactgtactcccactgtatctaggaagtaaccaacctgcttttaattttacaggctcataggtggaaaggacttgccttgtcttgaatgagactttggactgtggacttttgagttaatgctggaatgagttaagactttgagggactgttgggaaggcatgattggttttgaaatgtgaggacctgaggtttgggaggggccaggagcagaatgatatgatttggctgttccaccacccaaatctcatcttaaattcctacatgttgtgggagggacccagtgggaggtaattgaatcataagggcaggtctttcccatgctgctctcatgatcgtgaacaagtctcatgaggtctgatggctttataaggcagagttccccttcacaagccctctctttgcctgctgctatccatgtaagacgtgacttgctcctccttgtcttccaccattattgtgaggcttccttagccacgtggaactgtaagtcaattaaacctctttcttttgt

SEQ ID NO: 2153 - DNA, 1945 bp, Homo sapiens
agcttaggcgagctggttgctgggagaaaaacagatgttaaatgaactgcctttgggtcaaatctcattgccccctgaatcgtggacgctccagttcagagcgaagtcccaagaaacgtgtggctgctgaagccaaggctggggccggagctggagctggagccggagccggagccggggtggtggctggggtgggcacggcagtggacggaagttcctcagaggccagcctgtcactgactgtgtcctggagggtaacagctgagaagaggcctgacacgttgaagttgatgtctggagacagaaggagcggagacggctctcagagaccgcgccaggctcctcactccactggccgggaccgtttccccttcccctgaacccatctggaccatgttcagcttccccactcccgtgtgagcctcaccaccaccccacaaagcaggcagaccatccccgttgtaaaaatgagaaactgaggctcagacttcctcctggacttatgttgtgatctggacagcctctaccaagcaaatgcaatcagcacgtgggaggaaatcttgccatctgtggccaggtggccacagcaagttgggtcccaggactatggcgatgttgctgggtgtcatcttgttcacctcctgctcctcggccagccgtgccaggaacttcatcagctcctcctcctcctccttcagcgtctccaccttgttggccatggtcgtatggctgtgactacccgggctgcctcctaggccttgactgctgcctgaattcttggttgcctgactgagcctggagatgatcccaagggtcatctcaaactcggccaggatgcgggccagctgattctggatggcacagctcatctccaaggccttcctgtggacacggcaccccatgggtccaggcgcccgctgccctcacctccactggaaacacttggtggggcctctcctccctcacttccggcccctcctagatatccttcatctctgctaagctgaacaccctcccaggcctggccaccctcactgacctgggaactgtccccagcctggtcattcttctgatgtggatgccctcaccacctggaccccctcccagctgagatcacgtcttggtatccccaggtgagggctgggccccgtctgtgctcaccccatgctggaatcagggtccagctccttgaagctctcagccatcgtggtggacagagccatgaggggaagcttcttctgcagggagggtggggccggcgatgagtgtccgtgcctccctccaccctgcctgagcaccaggccagccccttggggcaggggaggagggaacccaggagggccacagtcccagatgagagtggagacaagatgacaaggcgtggtgggggtgacatttccctgagagcatggatggagcccctctccatctggcgtgccctttcctcttcccagaagccacttgactgggcaggaaggaatgaccaagtcctactgcagactgggaaactaagatgcagggagggcatggagcttgccccaggtcacacaggtggagggagaatgggagcgggagctctttcccctgtcccagggtatatatggctgacctagccaccgctgagttcaaacgctctatggctcccaatttccttgccttggccacactgaattgtcaactgattccaaaacatggccccacactcccaccctatctggagttacggggaatgcctgctctgggatcagagaccagggttcaaacctcagttctgccacttactagctatgtgaccttggacaagtgactttatctctgagcctccagttcctcatgtgtaaagcaatgcctgcccctagggttgtgccagtgttccatgagacagtgcactcatatgttagtaacaagctggcggttatcagccaataaacgctgcctcttgatt

SEQ ID NO: 2154 - DNA, 3174 bp, Homo sapiens
agctcggcaccagacgcccggtcaggatacttgtggtgaaactgtgagggcgcactgggtcctttggggttttctcccatgacagcctccaagacaaatggaagagagaaagtgacacccagcccttcttcagccgtgttttcccctccctgagccagggtccaggttcaaggctgggggactgccatgaggccacctatgactacagggacatcccaaagctgcagccatggaagcagccagggccaggccactagggtcaggcatcttggccaaggctggacaaaaggcactgtggcctggggatctgaatgggagtgggagtgggtgggccactcctatacggccacatgagggccacagagaaagtacgctgggtctgagactgagaggtgtcaggtgtctggggcatgtcaccttgcgccaagggatgcccagcctgaacctggctttacacctagggccccacttcacctcctccctgagatttacaagggagaaactgaggccctgtttactactggggaaaccgaggatcagggaagcgcagggctgcgcgtggcgtagggcgctctgtcccagcaaccaacggatgtaagcccgtaggtggggagggcagcaccggatgccccactgggcccagggatgcacccaccacaggatgctgggggagccaccggccttggccagcccagctagccctgtggctttccagggcagctgagagcccaggtccccatggctaagcccctcagcagcccagtggtcctgagcccgccgaccccagacccagtcctagtccggccagaggaggccgtttacgagcccacacccgtaggtggcgccacagccggagaattggctttggttctgttggagccgcgccgcctttaaattagccccacgcatgcgcgacttttctagcccgagcccgccgtctgcgcctgcgatttcgcccatactccccggtgcccgcctcgtgacgtgccgcagtgttacgaagggacaccagggcgcaggcgcagctcgctcctcaggcctgcgagaggcccgccggcccagcagagggcgcccaccaatctgcacgcgggcccagcgagttatcttgatttcggccaagctttctgactgctccaaaaaacgaagaaaaagattcagggagagtaagaggatgaagagagctggtgaagcagctgaccaaatggcccgaggtggtatgcagccgcggtaaagcagggctcctccgtgaggcacagccgcccgggggttccctaggggaagcaggggctgcggcagacgcctctcgggcaggtcagggtatgcaccctcccgcaggggctcccaaggccgggcgtgcgtgaggccaggtccacgggcacaccactgtgaacactgattaaacgtggcctccacggcttccaacccccaggacaggaccaaccctctgcccccggctcaggccagagctcggcgagaccgtcgctgtttaacaagcatttgctatacgccaccttgcattatgacagcatgtgacccacacagccatcctaggaagcaggtaacagccctactccattttgcacggaaagacttgcctgaggtcacagagagcggcaggcctgggatttccatccagggatccgactgcagagcacgactctggagggtcttccttcttgctcctcccatccttccactgtccttggatcccccattttccccctgcacaatctcctaatccctatgttcaacttctcattttcaactggatctttcccaatggcattcaacacacttggtgtcccccaccttagagtagaacattcaagcagcacagcctcctgaaggccctcactcatccctttcccagcctgtttgcaaaatgctttgtcaggactcaaagttaagtctcacttccgtccaattcccatccccacaccaacacagttctcaagtcaccaatgggtaaaaggcttcagtgatccactcctacagccaaaaggcactgctcggtctcttcagcctcagatggttcactcctggaaacatttttccacttggcttcatgacaccacagtcctggtctttctcgtcccaggtaaggagagtcctggtctttgtcaacccaggtggccactattactttgtcgtcttaatattcagttctggatctcttcttattctatacccttcctaggcactgtcccctcccacagcctccttctcaccttttccataaccatgtctaggcccggcagccccacatttaccacttgcacaccagaccttataattccaggcctgaatatccacctgcccagggacactcccacttggatgtcccgagcacctccattttgccatgtctgaaacagaattcagcatcagttcctcacaactggtcttctacagacttccccagtaatccctcaacccacctgccaatatttaagctgtttgtaagccactcatgcaaacattcaataacccaactacgtgtcatagattggtctgaacacctagctgttaacataaagatgagcataaaagacaaaacccctgccctattgaagccagttcagtaatcacacacattccaaccgtggtatatgaggtggagaagaggtacaaaggaaaacgagagggtaccacaggacttgactgagtgtggcaggccacggatggctccctgacacagtaaccttaagtaacacatcctgaggctgagcaggaattcattaggtggagacagggagcgaactcctgcagagaggaaagaggggcagaaagcctggcactcactggcactgtcgattccccacatgacctttcaatcccttgcctcttgagaggaaccatctctgctttgctcatcactgtttccttgatgctgagtaaaacatgactcacaggaaggatgcaaaaactacaaaaatggaggcctcactccactactccattctgtgacataagccacgtcaactctttcaacactctggcaccactttcaacactctggtactagaatacctcagtgttctaatatgtaaaatgtaaatgcttgccttgcaaacctgctgagaagcaaatccattatttaatgaataaaaagcactcgataaaagcactattcccaaaattaagaattaaattatgagagatcttcaacagacc

SEQ ID NO: 2155 - DNA, 1698 bp, Homo sapiens
gaaatcattttattgcacttgaccttaaactgtctctccgtaacctttctgccaacattaaggccaagtaggtgcaaattaaggtaagaagacagagtggatgggagtgggtgggtgaacaggacagaggaggccgccaggtggatttctcattggcggagaggacgcccaaaccctcagacctggcacccagcctggacagggtcgggatcctgcaggctccacggagcagcccctttgtttgtattctaatgtgttttgcagcacagaacagaagctgcactgttatgctggagcatttcatgaacctcaagtcttttatctgaaatcgaagcttaaatgacttcttttatctgctggctcgtgggccagccccgtccagtggctgaatgaaaaggaggaaggccagtgctgtcccatttgcaggcttcaatgagctcgacagccctgggatctcagagagcagagagctgatctggttgcagggacttcaaagacaacaggcgcaggagcccacactgcctcagactggccgtggccaagccccggctggatggcacaatgcgaggccttccctgacggccaggcccgtccaccctcggtctggggagggggttggctgggaggtgggcagcgtcttccagtggtgaagatgaagtcacccaaacgaaacccttctgcctacaattaagagtgcagtttctctgcacagaaggtggaaatcgtgtttttatgaccagagcttccttcttcccatgacttccccttataagattgtgtcttctctgggaacaattagatattaattatgcggtaaatgctttttatagtgccaaagattctatatatgcctgaaagaaaataaaataaaacaaacaacactgttcttcaagaaaaatggagtctcaccggtgagcaattcttatgaaacaggagaatttggcttggcagaagccacggggccatcccaggtaccactgtgagctgctccatcctgcctccggcacctcctcttcacccggcacctccttgtgccatcccgaggccgtcatccctccaccctccccagctccacggagccctccagtgctccaggccactgactctccgagtgggtccctgaaccagcagcatcagcattactctctgcaaacttgtcagaaatgcaaattctcagaacaccccagaccttctgagtctcaggacagtgaccggatgtacaagagttggagaaccagtgcctgggccttttcttcccctcttctctccattacgaaagaaaaacaatgctacatcccttccagtggggagcccatgcgcactgtgacacgctgtgctgtgtgcattccaccgccacttctgctcagtgtcccgacacagcagacagtgagagcagcaggacagggcaaaggtacagccagtgctcacgctgctgtgatctacacacagcctcagccagacccagcgcatgggtctaactctcaggtatctattcagacatggtctcacagagggccaggcagccttggggcccaatcacaagccagttagaaaggccacggagtacaacaatcactggttaatgatgtcataacactttgagtgctgcctactaattatgacatcattaacaatctccagcactttgcaaagagatccccaagtttgctctttcacccacagtaaagacactcccac

SEQ ID NO: 2156 - DNA, 1755 bp, Homo sapiens
acaccagtcttcggaagtcgcccgtcaaccggcttcttctacctcagtaaagccttaaggtcacctcaacctctcgaaacccaccagtcccagaggccgactcttctcaagtggaggagaggggaaggcgtgcatggagctttgcctgaccgctcgctctctcctccccagccgtctgagagaaggcgagaggggtcccagaaccgagccctcgctccgcacgccccacgcccgccccgctgtgccgtgcgctctgcccctgagacgccccggctcggagtcccagggccacagccgaaactcgccctcccgcgcccctctccggcttgcagcgcccgcccgcaccgccacctgccacccgaggcgacgcagtccgcttctccccacccgccaggtggcaggttcagggccggggtccgagcctgcttccctgcagctgccacagccaccctcgccgccagggggcgagagtcccaggcaggacaagcagcgctgctgccttggcgtgaaggtggtttcaaactttaggcttcttttccctaccccgcgtctctgaagagcagagaggaagatggaaaccgagtccgggccgcaaacatcaaaccagatgcaaacagattcattatctccatcccctaatcctgtgtcacctgtgcctttgaataacccaacaagtgccccaagatatggaacagtgatccctaatcgcatctttgtaggaggaattgattttaagacaaacgaaagtgatttaagaaaatttttttcccagtatgggtctgtgaaagaagtgaagattgtaaatgacagagctggagtatccaaagggtatggtttcgtcacttttgaaacacaagaagatgcacaaaaattttacaagaggctgaaaaacttaattataaggataagaagctgaacattggtccagcaataagaaaacaacaagtagggatccctcgttctagtataatgccagcagctggaacaatgtatctaacaacttcaactggatatccttatacttaccataatggtgttgcttattttcatactccagaggtaacttcggtcccaccgccttggccttcacgttctgtatgtagctcccctgtgatggtagctcagcccatttatcagcaacctgcatatcactaccaggccaccacacagtatttaccaggacagtggcagtggagtgttcctcagccttctgcctcttctgctccattcttatacctgcaaccttctgaggttatttatcaaccagtggaaattgcacaggatggtggatgtgttcctcctccactgtctctgatggaaacttcagttccagagccttattctgatcatggagttcaagcaacatatcaccaggtttatgctccaagtgccatcactatgcctgcgcctgtgatgcagcctgagccaattaaaacagtgtggagcattcattattaagacaattgggcagctctattccagctcaactgatttcttgtccaatgatccttgcgtggccgagatccagcttcaacgaaccagctagaagctgcccgttgtgaaacttagtgttagttaatacctcaccatactcagttattccactataagctgtctaaatttgatgaaatttgctttttcagctgttctacaaaattatttaggtagatgtggcatgttggttttttatgtgctaacctaactgtaatgaccttttctacaacatgttttatccattccataaataataaccac

SEQ ID NO: 2157 - DNA, 1805 bp, Homo sapiens
gagaaggaatccgacgctggggggcttgctcgggcggcagcgactgctgctgcggatgggagggggccggctcggcgcgcccatggagcgccacggcagggcttccgccacctccgtctcgtcggctggggagcaggcggccggggaccccgaagggcggcggcaggagccactgcggcgccgggcgagcagcgcgtcggtgcccgcggtcggggcctcggctgagggcacgaggcgggatcgactgggctcttacagcggccccacctcggtctcccgccagcgcgtcgaaagcctgaggaaaaagcggccgctttttccatggtttggactggatatcggtggaactctggtcaagctggtatattttgaacccaaagacatcactgctgaagaagaagaggaagaagtggaaagtcttaaaagcattcggaagtacctgacctccaatgtggcttatgggtctacaggcattcgggacgtgcacctcgagctgaaggacctgactctgtgtggacgcaaaggcaatctgcactttatacgctttcccactcatgacatgcctgcttttattcaaatgggcagagataaaaacttctcgagtctccacactgtcttttgtgccactggaggtggagcgtacaaatttgagcaggattttctcacaataggtgatcttcagctttgcaaactggatgaactagattgcttgatcaaaggaattttatacattgactcagtcggattcaatggacggtcacagtgctattactttgaaaaccctgctgattctgaaaagtgtcagaagttaccatttgatttgaaaaatccgtatcctctgcttctggtgaacattggctcaggggttagcatcttagcagtatattccaaagataattacaaacgggtcacaggtactagtcttggaggaggaactttttttggtctctgctgtcttcttactggctgtaccacttttgaagaagctcttgaaatggcatctcgtggagatagcaccaaagtggataaactagtacgagatatttatggaggggactatgagaggtttggactgccaggctgggctgtggcttcaagctttggaaacatgatgagcaaggagaagcgagaggctgtcagtaaagaggacctggccagagcgactttgatcaccatcaccaacaacattggctcaatagcaagaatgtgtgcccttaatgaaaacattaaccaggtggtatttgttggaaatttcttgagaattaatacgatcgccatgcggcttttggcatatgctttggattattggtccaaggggcagttgaaagcacttttttcggaacacgagggttattttggagctgttggagcactccttgagctgttgaagatcccgtgatcattacctggggaggggttcctgaaaccttccacaatgggatctgtggactttcatttttttaagagacttactcaatttcatgactgtactacctgaaacaaagtgagaaaggacaggtgtatttttctaagtcatcaagataaatccttaagaattcagtctaaattagcaaccaggaaggaaaaatatattaaaaacaacaaaaaagtggcacatgtccaggcagtgtgaggatttgctgtatataagttgcctgctttgtatttttgaaatctctgcatcactcattggaagtgcttctgaagagagctgctctgtgttcagttgactggttttgtgtcctgtttgaacttgctgaatgtaaggcaggctactatgcgttataatctaatcacaatttgtc

SEQ ID NO: 2158 - DNA, 2091 bp, Homo sapiens
actcgtcctcaaatcttatggaacataagagagttcacactggagagaaaccctacaaatgtgaagaatgtggcaaagccttcagctggtcctcaagccttactgaacacaagagaattcatgctggagagaaaccctataaatgtgaagaatgtgggaaagcttttaatcgatcctcaatccttactaaacataagataattcatactggagagaaaccctacaaatgtgaagaatgtggcaaaggatttagtagcgtctcaacccttaatacacataaggcaattcatgctgaagagaagccctacaaatgtgaagaatgtggcaaagcttccaactcgtcctcaaagctcatggaacataagagaattcatactggagagaaaccctacaagtgtgaagaatgtggcaaagccttcagctggtcctcaagccttactgaacacaagagaattcatgctggagagaaaccctacaaatgtgaagaatgcgggaaagcttttaatcgatcctcaatccttactaaacataagattattcatactggagagaaaccctacaaatgtgaaggatgtggcaaagcctttagtaaggtctcaacccttaatacacataaggcaattcatgctgaagagaagccctacaaatgtgaagaatgtggcaaagcttccaactcatcctcaaagctcatggaacataagagaattcatactggagagaaaccctacaagtgtgaagaatgtggcaaagccttcagctggtcctcaagccttactgaacacaagagaattcatgctggagagaaaccctacaaatgtgaagaatgtggcaaagccttcacctggtcctcaagctttactaaacacaagagaattcatgctgcagagaaaccttacaaatgtgaagaatgtggcaaaggctttagtacgttctcaatccttactaaacataagataattcatactggagagaaacgctacaaatgtgaagaatgtggcaaagccttcagctggtcctcgatccttactgaacataagataattcatactggagagaaaccctacaaatgtgaagaatgtggcaaagccttcagcagatcctcaagccttactagacacaagagaattcatactggagagaaaccctacaaatgtgaagaatgtggcaaagcttttaagtcatcctcaactgttagttatcataagaaaattcatactggagagaatccctaaaaatgtgaagaatgtggtaaatccttcagctgattctcagtctagtaaacataagaaaattcatactggagagaaaatctacaaaggtgaagaatgtggcaaagcttttaaacagtcctcaatctttattacacataagaaaattcatgctggagagaaacactacaaacgtgaagaatgtgacaaaggcttcaaccggtcctcaaaccttgtggaacataagagaattcatactggagagaaaccctacaaatgcgaagaatgtgataaagacttcaactgttcctcacaccttactactcataaaagaattcatactggaggaaaagccctacaaatgtgaaaaacgtggcaaagcttttcattagttctcaacccttactgaacataagggaatttatacaggagggaaaccctacaaatgtgaagaatgtggcaagccttttagctgttcctcaatccttactaaacattcatgtaattcatactggagggaattcctataattgtgtggaatgtggcaaagcctttaaccagtccttaaggcttactacatataagacaactcatactggagagaaaccatgcatgtgtgaagaatgtgggaaagcctctaacagatcctcaattcttaagaaacataggctaattcatacatgagagactctacaaacctgaaagatgtgacaatgcttttggcaacacctcagacttttctgaatataaaagaaatcatatgaatgagaaatcctagaaatgtgaagaatgtgacaaagcctttaaatggctgtcacacttgattgtaggtaagataatatactggagaaaactactagaataaacaatgtgacacacattt

SEQ ID NO: 2159 - DNA, 1756 bp, Homo sapiens
gtagtacacccgcgaccccgccccattcccagaaattaccacccgcccaacagcccggccgcgcggcggttggtgccggcgtttgctggctgtcgggtggctgggcccagcgcgcagctgcggagcgcggcgggcggccccttggagctgcccggggagctgcgggcactcgcacctagccattgtcgctccttgcgcggtccgcaacggagaagtaactcaagtctgagtgttgttggtgcgagaatgagagagtgttctggtgtgggagtattttggcccaagtgcctgcgaattcgaaaacgaaaacccagcagtggctgcacgcttctggtttccacactttcacacaaaggggagccttcgagcggggcactctcacgcgccttcaagtgcacaaaagccaatgacacggtgccgtgggttgccctgtgtaggagcgtctctttaatgggctttgtaggcacagttaatgcatacaaacgcctcagtctatttcttcaccaccaccattccccgccgcggcgttttctgtatttgtttctttaacaaagagcacagcctgtccggtgcgcgcggggctccttttgctcccctccagggctcctgcagcctcgccgcgatggacctagcacctggcgcggtattcaccagctgatttctgggctccagcgttaccctttttacggcttcacaaccagtctggagcaaagaagaaacactgaggaatataagtgatagctgttctcttgaaagggacgtgggaaccgtggaaatcaccctagagtaaggctcaaatgtcagaaagctgcaggaggctccagatttaaatccctgaagagcctaagaatgtaatgatctctttcttttgttaatactgctgttgcctctattttcttgggggtgagtcttctcttcctttcttaaaaagcaactctgggccgggcgcagtggctcacgcctgtaatcccagcactttgggaggccctggagggtggattgcctgaggtcaggagttcgagaccagcctgcctaacatggtgaaaccccgtctccactaaaaatacaaaaattagctgggcgtggtggcacacgcctgtagtcccagctcctcgggaggcaggagaatcgcttgaaccccggaggtagaggttgcagtgagccgagatcgcaacactacactccagcctgggcgacagagcaagactccttctcaaaaaaaaaaaaaaaaaaaaaaaggccgggcgcggtggctcactcctgtaatcccagcactctagaaggccgaggcgggcggatcacctgaggtcagaagttcaagaccatcctggctaacacggtgaaaccccgtctctactaaaaatacaaaaaattagccgggtgtggtggtgtgtgcctgtaattccagctactcgggaggctgaggcaggagaatcgcttgaacccgagaggcggaggttgcagtgagcccagatcgcaccattgcactctagcctgggcaacgagagcgaaactccgtctcaaaaaaaagcaagtccgagggctcttattcttatttaaaaaatttttactcttgaacacagaggaaacctggagaccgtgactgttaatcaaagatcctcttaactcttgacaaagttttctggattcctgagttctaaatcatgggactgttgacacccttttgaactaaagaatttgtaacaatttggtaacattcaaatctttaatacacaataaacaggattctgcaaac

SEQ ID NO: 2160 - DNA, 1679 bp, Homo sapiens
gtgtgctgcctggcaatggggaactctgagggctgatttgccagtgatgggaagagttagaaacaggatgcccagcccttctcgcctcaagaggccactgggatgcagccactcctgtgcttggggaacctggaggatgcaagggaaaggactggcactctgctggcacagcacccggcctggggcaggacacgggcgaagccagggtctcccctcaataccaagaaggagggtgacctgatagctgctcaggctcggctgaaggacctggaggctctgctgaactccaaggaggccgcactgagcactgctctcagtgagaagcgcacgctggagggcgagctgcatgatctgcggggccaggtggccaagcttgaggcagccctaggtgaggccaagaagcaacttcaggatgagatgctgcggcgggtggatgctgagaacaggctgcagaccatgaaggaggaactggacttccagaagaacatctacagtgaggagctgcgtgagaccaagcgccgtcatgagacccgactggtggagattgacaatgggaagcagcgtgagtttgagagccggctggcggatgcgctgcaggaactgcgggcccagcatgaggaccaggtggagcagtataagaaggagctggagaagacttattctgccaagctggacaatgccaggcagtctgctgagaggaacagcaacctggtgggggctgcccacgaggagctgcagcagtcgcgcatccgcatcgacagcctctctgcccagctcagccagctccagaagcagctggcagccaaggaggcgaagcttcgagacctggaggactcactggcccgtgagcgggacaccagccggcggctgctggcggaaaaggagcgggagatggccgagatgcgggcaaggatgcagcagcagctggacgagtaccaggagcttctggacatcaagctggccctggacatggagatccacgcctaccgcaagctcttggagggcgaggaggagaggctacgcctgtcccccagccctacctcgcagcgcagccgtggccgtgcttcctctcactcatcccagacacagggtgggggcagcgtcaccaaaaagcgcaaactggagtccactgagagccgcagcagcttctcacagcacgcatgcactagcgggcgcgtggccgtggaggaggtggatgaggagggcaagtttgtccggctgcgcaacaagtccaatgaggaccagtccatgggcaattggcagatcaagcgccagaatggagatgatcccttgctgacttaccggttcccaccaaagttcaccctgaaggctgggcaggtggtgacgatctgggctgcaggagctggggccacccacagcccccctaccgacctggtgtggaaggcacagaacacctggggctgcgggaacagcctgcgtacggctctcatcaactccactggggaagaagtggccatgcgcaagctggtgcgctcagtgactgtggttgaggacgacgaggatgaggatggagatgacctgctccatcaccaccacgtgagtggtagccgccgctgaggccgagcctgcactggggccacccagccaggcctgggggcagcctctccccagcctccccgtgccaaaaatcttttcattaaagaatgttttggaacttt

SEQ ID NO: 2161 - DNA, 2041 bp, Homo sapiens
ccccctccagccccacctcttcccccggccctgggtggggcccgcacctggggctctccgctcgttagcgcgcccagggcgcctcctcggcccgagagggacccgcccgcggggcctggctggctcagggctacctccttccgcctaggacccccccttcggtgactcccgattccctgtcctaggctgcggtgccccgggaggcgggtcgccagagtggcagacagagctctttaatgggtgtcttctagggcgggtgctgtttgtgcatcatttgggttcccacacacttcctatgaggtggcgaaagccattatgcctatggtgtctgctcacacagggggaaactgaggcccaggcaggacagccccttgcctggggtgggggctgggttgtccttaggcctgtgacttcacctctacagcaccctcctgtggaccctctccctgcccccgccaggccagagtcctgcagccaggcccagaccctggcctgtccgtccggggatgctggacagtactcctccctccagccctcataagtcattgtcattcggatctgcatttccccagcccctctccttctaactggggggcactgtggcccacagtgcccctttctcttcccattccttccccctacacccattccagacatcccagagttaacaaaacccaaaagaaagagaaaaaagactcagagctgcttggaggagatgacatcctcaaatgtagcgccgttgtttgaggggctggtcccaggcacctttctctgtggcctggggtgtgcgttttggtccccagcgtgatttgaaagaagatggaggttcagcgaagcagaaaggaggtcttggaatatgtgaggcctgttccagatggcaggtgcgactcggtggtggcggtggcggcggcagctacgcgctaacagttggagattgtgcacaagggtggagaagagttacctccctggctcaatcatggagacattctgatcagcagttctcaaaatctgtcttgcatcagaatcatctgggggggcctgttaaaacccccagcacatcagatttgggttctccttgaaggccacgtagacatcctggcgttcttcccctagggtgtagcacacatggaatccaggtggccctagctcaccagaggacagttcaagggggcagatggcctgtcggagccagagggcatctctctgaagcgggtcgctgtggtggaagatttctttgacatcatctactcgatgcatgtggagagctcagcggagccaggcaaagcccccaagcacgctgggcagaagaaaacctaccgagcgatcgcagagacctatgccttcctcccgagagaggccgtgacccggttcctgatgagctgtacggagtgtcagaagaggatgcactttaactccaatggcctggaacccaaagaaaacgagcctccatctccactggtctctgggattattgattacaacatgcccctcacctccacctacctgaagcagatgaagcttcgagtgatgaattcccaggagcaggatgagacttctgtgagcagcgaggattttgatatgagcgactccacatggatgtcagctgacccgcacctggcctccagcctgagccccagccaggacgagaggatgcggagcccgcagaacctccacgatcaagaggacggtggtgtctgtctccagggccccaccgcttgagccacctgtcccaaggcctgaacatcatctgcagcttggacacctctctacgggccaggaaccccagggtctctgcagagagaaatgatttcagttttaggggaagatctaggtgtgtgacgtctaattcattagccaaggacggctactgagccttggaaaaggctagtgcagacaggtgtgcaatacacgctgcgtctcagcggctccgtaggaaagaagaaggtgaaatatctcagctctgataacacggtatcaattatttgttgaaatggtactattttggatatattgggttaaataaagtagattattaaaattg

SEQ ID NO: 2162 - DNA, 2642 bp, Homo sapiens
atctgtaaaatggggtggatataaccacactcacaaagttattttgtatgctttatgctggggaacaaatctcttcttatttcactccaacacctttaacagacaaagcttgttggcctgacaaatctgtgacaatgcccctaggccctgatttgacaagctgtgagatgcccattttcgcttgagtcataactttattagtgttgacacatcctgttaatggattttattatgtggtaatgatacaatgaaagtttacattgtagtaatagctacgactataattgggagcctatagggtagcacatgcctcacagaaatgatgttagtgtttaaacttgtcctgcattaaaccatgacacctggtagaaattaatgccctggagcagagtctcactctctcacccaggctggagtgtagtggtacaatcttggctcagagcaacctctgcctcccagattcaaggattctcctgcctcagcctcctgagtagctgggattacagatcacaaagaagaactgacatcttacctgtctttaaagaacatcacttctccccgaatcgtagttatagcatcaaagagtcgctgggaagctgtgagacaccacaccccagaacagcagcagcagcagtggaggaaagctgtgcatactggcctttgtcttctttctcagtgcaaggtggtgatttaagaaggtgcgttgcctggacactaaacaacatagctgtgttgctgccgtgaggaaagccagcctcaaggggactgaataagctgcgtatttcttcctttgagcgcagctggtgcaataaacaggagctcgcagagtcccgtggccgcggaggggcgccagactccggggaagagccagagcgaggtccgacgaatcgggctctgctggcgaccagcccccttcctttcctccctggtggggctggcggtgggtgaccacggccgcatctgggaggcgactcttcggattcaagatgaccaacaaaaaaccctcttccccaaagggttagactgagcgaaacttcaaacggatggcaggagatgaatgaattctaaaatggaaacaatatgaaacacatgcgcaagctttggaggcaagaacgctgacctcaacctcagtgaaaactaaagcaaaagcagcaagagtctgcgcggggcaaacgtccttgcgatgcgactagcagacaagaggcaggagatgcgaggcgtcctacccgaatttagtacctccagcaaatctgtggcccagcgtggcccgatcaacaatggtagaccgagccatcaacctgttttcctaaaaatgaaaggtgatctggccctgactgaagacaaacgggaacaagcccaaaatgaacagagtgcctggaagtttacgcctggtaggtaaactctccagtcatattctcagtcaaggcttccctgacagtcccactactagaaagtcactggggggacagccaaggactcgtttctacaccaacactcagactttttgagaggaaaggaaaaaagccgcatttttatactccccagctcctaatggttaatgtgaaacttaccaatgaaccttgcacttcagttctttccctccccatccgctttgcttcagaagcctggtagacttgcactatcccaaagaagcggccacctctgaagaattcctctttgggaacatgtggatacttgagaaatgtttctgtttgaagaaaatagagggagaaacaaggtcctaaggcacacaatgtctttggacagttcggagaaatgaaaacctggagactttaaatcatgaattgaacataaattccagtaaaatggaaaatggactatgcattgctcttacccttgagcatagtgacttagaaactctaaagagcaggtcttcaaataacatggattagttatgacgtcgaagagaaaaaaaatccatttccggtcagggccatggtctgtgtggagttttcaggttctccctgtgtctttgtggattttctctgggtacttggtttcctcccacatcccacagctgtgcacatgaggctcactggcttgtctacatggtcgcagactggtgagtgtgagtgagtatgagtgcgccctgcgatgatggaatggagtcctatccagggctggcctgagctgccaggatgggctccagccactcaacactctgaactggaacaagaagtttccaagaacttatccagatgttaaatgaggacttttcaacatattggttttgccagtaagactgtgaacttcatcattgttgttgaactgctgggtcaaaactcaaatgagattgagcaagttgaggttgagacagatttcgatgcttcctcaaggttactcagcaaggaagaatggagacagcactcggtgccagctctgtctgaaaacacagccagattccaggttacagggttattctgcttccgatcagataaattctccacttgcttggaaactctaatcacctatttctttcttccccaaaaatcctcctcccttttccctgcattgcagcctaggaagcacagcaactatttcaaaacaccaggggaccctttagtgctctgcaaacatggtgatcaggttacctttcaataaagatcatcagcctccacttc

SEQ ID NO: 2163 - DNA, 2518 bp, Homo sapiens
gtagccagccggccacctttgggccatggcagccgaaggtgctgtgtgcggcttcgtctatctggagggcactgcctgggcggtccctgaggacaccgaacccttggcatcctgcacattgggacatggcaaccacagagagagcagcccttttctttcccccttggaggcttccagaggaattgactactatgacaggaacctggcactgtttgaggtggttttcacaaatgggctggcagtgattgtagccaaggcggggtagagagaagcagccgcggggctgggcctttgagtgccacgtgctggggtgtggtgtgcacacctgtccagttggatggcttggacttccccaggaagagctggacatccgcccaaaggtatcgtctcttctgggaaagctcgtcagctacaccaacctcacccagggcgccaaagagcatgaggaggccgagagtggggagggcacccgccggagggcagccgaggcacccagcatgggcaccctcatgggggtgtacctgccctgcctgcagaatatctttggggttatcctcttcctgcggctgacctggatggtgggcacagcagaccctgctgacggccatctccatgagtgccatcgccaccaacggtgtggttccagctgggggctcctatttcatgatctctcgttcactggggccagaatttggaggtgctgtgggcctgtgcttctacctgggaacaacattcgcagcagccatgtacatcctgggggccatcgagatcttgctgacctacattgccccaccagctgccattttttacccatcgggtgctcatgacacgtcgaatgccactttgaacaatatgcgtgtgtatgggaccattttcctgaccttcatgaccctggtggtgtttgtgggggtcaagtatgtgaacaaatttgcctcgctcttcctggcctgtgtgatcatctccatcctctccatctatgctgggggcataaagtctatatttgaccctcccgtgtttccagtatgcatgctgggcaacaggaccctgtcccgggaccagtttgacatctgtgccaagacagctgtagtggacaatgagacagtggccacccagctatggagtttcttctgccacagccccaaccttacgaccgactcctgtgacccctacttcatgctcaacaatgtgaccgagatccctggcatccccggggcagctgctggtgtgctccaggaaaacctgtggagcgcctacctggagaagggtgacatcgtggagaagcatgggctgccctccgcagatgccccgagcctgaaggagagcctgcctctgtacgtggtcgctgacatcgccacatccttcaccgtgctggtcggcatcttcttcccttctgtaacaggtatggcgatggtgtcagcaggaacttggtggtgggcacactggcctggccttcaccctgggtcatcgtcatcggctccttcttttcaacgtgtggcgctggcctccagagcctcacaggggcaccacgcctattgcaggccattgccaaggacaacatcatccccttcctccgggtgtttggccacgggaaggtgaatggtgaacccacatgggcactcctcctgacggcactcatcgccgagctgggcatcctcatcgcctccctcgacatggtggcccccatcttatccatgttctttctgatgtgctacctgttcgtgaacctcgcctgtgcggtgcagacactcctgaggacccccaactggcggccccggttcaagtactatcactgggcgctgtccttcctgggcatgagtctctgcctggcccttatgtttgtctcctcctggtactatgccctggtggccatgctcatcgccggcatgatctacaaatacatcgagtaccaaggggctgagaaggagtggggtgacgggatccgaagcctgtccctgagcgctgcccgctacgcgctgttgcggctggaggaggggcctcctcacaccaagaactggcggccgcagctgctggtgctgctgaagctggacgaggacctccacgtgaagtacccgcggctcctcaccttcgcctcccagctcaaggctggcaagggcctggccctgtcctggacccagctttgctaggtctccttggaaaccaggcctgggcctcaaaatggagatggatcccaggtcttgtgggaccctgggatgtttggggactttactatctagcaccccagtaggcctgtcctggccagagaagactggtaggggccgagtggggtttgaaggcagccggcccggcccagcccaggagcgctatttattgcatatttattgtttggatgtcaccatcagagacgaagggaagggtagccagggagggagtccagcccagctgcctgcaggaagatctggctcagtctactatgggcagggccccccaccaagctgagccgaatggagacagctgagctgaggcctgactttttcaataaaacattgtgtagttctgg

SEQ ID NO: 2164 - DNA, 2054 bp, Homo sapiens
agatgcatcctggaggctcagaatgttcccgaccgttactttgctgtctcctgggccttcaacagctcgctcatcgccaccatgggtcctaacgctgtgcctgtcctcaacagcgaatttgctcaccgggaagccaggggacagcttaaggtggccaaagagagcgacagtgtctttgtgctgaagatctaccacctccgccaggaagatagcgggaaatacaactgccgggtgactgagcgagagaaaaccgtgaccggggaattcattgataaggagagcaagcgtcccaagaacatccccatcatagtcctccccctcaagagcagcatctccgtggaggtggccagcaatgccagcgtcatccttgagggcgaggacctgcgcttctcctgcagtgtccgcacggcaggcaggccgcagggtcgcttctctgtcatctggcagcttgtggacaggcagaaccgccgcagcaatatcatgtggctagaccgggatggcaccgtgcagccaggctcgtcctactgggagcgcagcagctttgggggcgtccagatggagcaggtgcagcccaactcgttcagcctgggcatcttcaacagcaggaaggaggacgagggccagtatgaatgccatgtgactgaatgggtgcgggcagtggatggcgagtggcagattgttggggagcgccgggccagcactcccatctccatcacagctcttgaaatgggcttcgcagtcacagccatctcccggacaccgggggtgacctacagcgactcctttgacttgcagtgtatcatcaaaccccactaccctgcctgggtccccgtgtcggtgacatggcggttccagccggtgggcacggtggagttccatgacttggtgaccttcacccgggacggaggggtccagtggggggacaggtcctccagcttccgaacccgaactgccatcgagaaggctgagtccagcaacaacgtccgcctaagcatcagccgagccagtgacacggaagcaggcaagtaccagtgtgtggcagagctgtggcggaagaactacaacaacacctggacgcgactggcggagaggacctccaacctgctggagatcagggtgctgcagccagtgacaaagctgcaggtgagcaaatcgaagaggaccctcaccctggtggaaaacaagcccattcagttgaactgctcagtcaagtctcagactagccagaactcccactttgcggtgctctggtatgtccacaagccctcggatgccgatggcaagcttatcctgaagaccacccacaactccgcctttgaatacggtacttacgccgaggaggagggcctgagagccaggctccagtttgagaggcatgtgtcggggggcctgttcagcctcaccgtccagagagccgaggtcagcgacagcggcagctactactgccacgtggaggagtggctgctgagccccaactacgcctggtacaagctggcagaggaggtttctgggcgcacagaagtcactgtgaaacagccagacagccgcctgaggctcagccaagcccaggggaacctgtcggttctggagacccggcaggtacagctggagtgtgtggttctcaaccgcaccagcataacctcccagctcatggtggaatggtttgtatggaagcccaaccaccctgagcgggagactgtggcccgcttgagccgtgacgccaccttccactatggagagcaggcagccaagaacaatctgaaggggcggctgcatttggagagtccttcccccggcgtgtaccgtctcttcatccagaacgtggctgtgcaggacagcgggacctacagctgccatgtggaggagtggctgcccagccccagtggcatgtggtataagcgggcagaggacaccgctgggcagacagctctgacagtcatgcgaccaggtgagggtccacgtccccaagcttccactccctctggtgtttcccatttaagtatactgttttatgcactggataaaattagtttattaataaattatttgcagtt

SEQ ID NO: 2165 - DNA, 1638 bp, Homo sapiens
atgtggctggccagaccaagggccagtgtgactgtgaagcagcatcatgagaggggtaaaaccaaggaacagactgcatgagcccttgggccccttccagctctaatactccatggtgatggcagccctgcccttctctgaagatctcaaaatgcctgacacctgtgtccttccgcactgccctgggaaggagaataaggatggcagaagctctccggaggatccaggtggtgcatgcatttgacatcttccagatgctggatgtgctgcaggagctccgaggcactgtggcccagcaggtgactggttcttcaggaactgtgaaggtggtggttgtggactcggtcactgcggtggtttccccacttctgggaggtcagcagagggaaggcttggccttgatgatgcagctggcccgagagctgaagaccctggcccgggaccttggcatggcagtggtggtgaccaaccacataactcgagacagggacagcgggaggctcaaacctgccctcggacgctcctggagctttgtgcccagcactcggattctcctggacaccatcgagggagcaggagcatcaggcggccggcgcatggcgtgtctggccaaatcttcccgacagtctattgactcagaggacagctttgtcccaggccgaagggcctctctgtctgacctgactgacctggaggacattgaaggcctgacagtgcggcagctgaaagagatcttggctcgcaactttgtcaactacaagggctgctgtgagaagtgggagctgatggagagagtgacccggctatacaaggatcagaaaggactccagcacctggggggagcagtaccatcaggcttggaggagaacctgtgtaagatctgcatggactcacccattgactgtgttcttctggagtgtggccacatggtaacctgtaccaagtgtggcaagcgcatgaatgaatgtcccatctgccggcagtatgtaatccgagctgtgcatgtcttccggtcctgagagcttgcatcggtttcttcagtgccttacagggaaatagcctggggtgtctgggctcagggttggccagcttgcagaggagcaagctagtagaaatattgcagggttcccaaaaccaggtcaagcaagatgccatgtcacccctgagcatgcctgtcttcccaggggtgtacctcttggctggcaaagcccaaggccagtgggaacttgtataaatcacatgggtatgttcttggttcagtgatcttggagtgatgatggtaactgatgaacagagaactttccagaacttgggtcctgtcttcctccctgaacctagacagtttcacccctcctcctgtacccaacccatccccaccccatatgggagatgcttgcccatgtgtttcatcaatcagaagtcctcctccccagcacattcggatttaaatttctggtctctccggctttctgtgctttaactatctttgctaaagtctcttgctacattgcctaaatccatttgtttctttggaccaaaaatgttagtttaccagaccgatagtggtccttaggacagattttagaccagtaaacttatctttggtgagaaatgaaatacaaatgctatagaaaaatt

SEQ ID NO: 2166 - DNA, 2341 bp, Homo sapiens
tttgccaagacttcacagctgataactcctggtgttatccccaaaccaccactcttgactccctcttggactggatagatgatctttgctgacagggcaccctccaatacttccaccctgatgaagttctattctttacttttatactcactcttattgtcattcccattcttatgccactctttacctctcccaaattgcctccagcatactgtcaatttcacccactctctcctcactgcctccaatccttctctagcaaagaattgttggctatgtgtttccctttcttcctgctcttacacagccaccccgctctacaggccgattgggctacctctcccgtctccctgcacctctgaacctccttcgatagcactcatatttacgcacctggggaacttctttactttctagacagatttggtgagaactcctcagacatttcacaccaacaagctgtctgccacacttctccgcatctacttatagcacctttctccttatgtcaattccacccccacccatatttggacccctaacctcacaaacaattatccctgttgccgctccgttatgcatctcccaacaacagcctactggaatccctgcaggcaaccttccactgtccaaatattcctttactctttatctccagaacccaaccacacacattaccaaacggatgggagcattccaactttgcattactgataagccctctatcgttacaaactaaaaagcattggcagtcactattgtttaggaagacacctaccctgcatctcactccatccttggctaccctccccctgctcatctgaatctcctcctagcccctcctcttgcttgtttatacccagccccatgaatagcagtgaaaggttacttgtagacactatgcgctttctcatacaccatgaaaaccaaacccctccctctacacagttgcaccatcaatccccattacaacctctaatggctgctgcccttgctggatctctaggattttaggtgcaggattcctctttcagtacaccctctcaccttttcactttacatttccagttctgcctgacacaaggtctcttctttttatgtggctcttccacctacatgtgcctacctgccaactggacaggcacatgtactctagtcttccttaccccccaaatccagtttgcagatgggaacgaaaaactgcctgtccctctcatgacaccaacatgacaaaaaaagagtcatcccactaatccctttacttgtgggtctaagactttctgcctccactattgcacttggaactggaatagcaggcatcttaacctctgtcacaacattctgcagcctctctaatgacttctctgctagcattacagacatataacaaactttgtctgttctccaagccctagttgactctttagctgcagttgtcctccagaactgctgaggcctcaatttattcactgctgaaaaaggaggactttgtatatttttaaatgaagagtgttgtttttacctaaatcaatctggcctggtatatgacaacataaaaaaactcaaggatagagtccaaaaactcaccaaccaagcaaatgataacgttgaacccccctggacactctctaattggacgtcctaggtactcccaattcttagtcctttaatacctatttttctccttcttttactcggccttgtgtctttcgtttagtttctcaattcacacaaaaccgcatccaggccatgaccaataattctatacaagaaatgctccttctaactaccccacaatatcaccccttaacccaaaatctttcttcggttgaatctctcccactgtaggttcccacgccacccctaatcccgttcgaagcagccctgagaaacatcacccattatctttccataccacccccaaaattttttgccgctccaacacttcaccactattttgttttccttttcttattaatataagaagacaggaatgtcgggtctctaagcccaagctaagccatcatatcccctgtgacctgcatgtatacatccagatggcccgaagcaactgaagatccacaaaagaagtgaaaatagccttaaatgatgacattccaccattgtgatttgttcctgccccaccctgatacatatattctcccctgcccttaagaaggtactttgtaatattctcccccataccacccttaagaaggtactttgtatgcctatcccaaacctataagaaataatgataatcccaccaccctttgctgactcctttttcagacttagcccacccgcacccaggtgaaataaacagtcttgttgctcacac

SEQ ID NO: 2167 - DNA, 1604 bp, Homo sapiens
actgccctaacagagcaggtggggaatgttctgtttactccacttgtgcttctatttggccaacttcgcctcttcaattaaaaggacacatgctgttaacgggtgctgtggattacagatgatcgcactctgggcacagtcctctggaaatgcagatgcccgtgtggaggaaattctggcgggagaggagcggcgactcgccgctctgcttggatctcaaggcatgaggttctgggtgtgcctcgcagcctgcagagccatgtggggccttgctgccagacgaggacgggctgaagacagcagctcgtctccagtggacgcctccaagttcccatggaggggtgggcagcatcgcaccaccatgatgccttgtctgctgcgggtgggagttttcaggccctgtcatgtgagacccacgggggatccttcctgcgatgtgcagcctccacgactcggcttctccagagtgccagatacacaggtggcattttatggcagtggtcactgggacccaactcccttcttctgtacacagctgtttttttaatttccaggtcagaaaaattatcttcctactttgaactctttctcccttttgccaaaaatgtttctctcttacaatgcagaagcagaacacagctcctgctcttgaaatactggatggatgtttcagagggtattgtgaggcttggagctccagccagtgacattccagccacatccttctctcctggctccacttcacagaggctggctgtgtctctggactacacctcagagctaatctgctttctggaagggtcgtgtttacttctgctggtgctgtgcatgtaggagacagctgtggccagccctgtttccctggggaggtggcagaggcggtaccatgagcaagggatgcagatgctcaagggggaccagtcaggggacacggggagggtttggcctctccagccaggggctcgccacctccatggtataaacatccatgtgaacaaaaaagttctaacaagtaccagcacactgagaatattttaaaccacaactatcgtggaaaatctgggagggtggttcctaggtccagggtggaaaagtagctgaaaacctggtagggtttgaagaacaatcagaggcggccttccacttctgagaacagttcctgtgagtcacctgatgttgttctagattaattctatcaaagacagtgttggtcaacccagctgcaggcacttgatttcctctaaaagctctggataacagaagcagagctgtgaagaaagtcaagttgaataaaatgcttccacttaaaagaatagggcttttccttgaaatggtccactggatcgaccatttcctctcatttattattattatcatctccattcccatgcatgctatttagacaaggaaggctggaagcaagtgacaggtgcggcagtgcgcagcaaggcctctgcacctggcccgtcagtagggccggcacgcagcctgactactgagtttcttctgcctcattcctctccagaggccctcaacttacaatagagacccaggagctgggagatgactgaatctgttaacatgacacagaaggactaacccat

SEQ ID NO: 2168 - DNA, 1808 bp, Homo sapiens
agcgaagcccgcgcctgtgccaaggcttgcgagcagaatgccttcgcgatggacgcccgcattccacccccttgaccgctgggacccctagtggcgggtgggtggagcgcgctccatttacctgctggttacctcgtgaggcgcctcaggtgagaagccaaatggaaaaccagtgaagtgaccatgggtgccaaaggcctaaagagcaggcagggaaatgagactcgggaccactggagccccatgctgcctctgacaagccctggagctctgggtctcaaaggctggctggcaacaggctgcaccgggcatgggaatccgccggctgcgagattgggggtaaagagctcagacatggtcagaagcctctgcctaacacacggctccagtagccactcctcaggcctcctgcgccctcgggggtgcgtgacacaggaggatgagttgagctggctggtggccccagtgtgccgtactactgtcccttggggagagtgggacagggtgggcgcctgacacacaccacgcgccccagaaacattcagtgtggacgtttcctttttcagcaaggacggcgcccaggtaaacgccacgtaacccaaaccatcaacactgcagcgtcctgcccaaggctcacgtggggaaccggacaggtgctagatgatgataggaacggtgggctctgagggaggacagacaggctcaccccacggggacctcagaacagcctgcctcatactcagagtccaaaaaagaaaaggaacgtacacatctcctcccaagttaaacacgagaggtttgtcctcaacctcagggctggaaaccaccacaggtaggaggctgggcacgggggctcggcctgtcatcccagcactgtgggaggtcgggtgctagaatcccagcactgtgggaggccaggcacgggggctcacgcctgtaatcccagcactatgggaagctgggcgtgggggctcagcctgtaatcccagcactgtaggaggccgggcgccgtggcgcatgcctgtaatcccagcactgtggatggccgaggcaggcggatcacgaggttaggagttcgagaccatcctggctaacacggtgaaatcccatctctgttaaaaatacaaataactagctgggtgtggtggcgggtgcctgtaatcccagctacttggaaggctgaggcaggacaatagcttgaacgcgggaggaggaggctgcagtgagctgagatctcaccactcactgcactccagtttgggtgacagagcgagactctgtctcaaaaaaaaaaaaaaaaacaagaacatctcccacacactcacagtgcctttgtagtcccagggaaagcaatcccttaagatcatttgttgggtgaaaagggtaccaagtacacagtgttaggaccgtgcaaaaaaagggtgacaggaagtaccctttgcaaactttccataatgtgtacttaattcactgctcttataaaatgaaattaaataaaacaaaaaaatactactgaaaaataattgggcaacatgcggtggctcacgcctgtaatcccagcactttgggaggccaaggcagacggatcacctgaggtcgggagttcgagaccagcctggccaagatgatgaaaccctgtctccactaaaaatacaaaaattagctgggcatggtggcaggcacctgtaatcccagcttctcgggagactgaggcaggaaaatgtcttgaacctgggaggtggggttgcagtgagccgagatcgcgccactgcactccagcctgggcaacagcgtgagactctggctcc

SEQ ID NO: 2169 - DNA, 1937 bp, Homo sapiens
atcagttgttatcattattaggcagatgggagcaaaatggacaggagagaattggaaaagattccaactatgagcaggagggtaaagtccagttcgtgattgacgcagtctatgctatggctcacgcccttcaccacatgaacaaggatctctgtgctgacttccggggtgtctgcccagagatggagcaagctggaggcaagaagttgctgaagtatatacgcaatgttaatttcaatggtagtgctggcactccagtgatgtttaacaagaacggggatgcacctgggcgttatgacatctttcagtaccagaccacaaacaccagcaacccgggttaccgtctgatcgggcagtggacagacgaacttcagctcaattaattaccaaggggccttgcactgagggcatcaacaagatatgtggcccaagacagctgcttggcttcccatccaagataaagtcagatgctctagaaatgtgtgcatgttgaggactgaagggaggagaaactttgcttcttatttatcacctgtcaggtctggagaagcacagatgccaagtgcatggaacacagaagctgctcagtgaatggcctttgattatgagataggagaattacaagatgatgttagaaggatgggatagagaccatttgtgcctgctacagaatgttggcatggaaagtccttccaggacatcgtagtacccttagtagtatagaagacatgcagtggggtaaaggagtccgagagatacccgcctcagtgtgcacactaccatgtaagccaggacagagaaagaagacacagaaaggaactccttgctgttggacctgtgagccttgcgatggttaccagtaccagtttgatgagatgacatgccagcattgcccctatgaccagaggcccaatgaaaatcgaaccggatgccaggatattcccatcatcaaactggagtggcactccccctgggctgtgattcctgtcttcctggcaatgttggggatcattgccaccatctttgtcatggccactttcatccgctacaatgacacgcccattgtccgggcatctgggcgggaactcagctatgttcttttgacgggcatccttctttgctacatcatcaccttcctgatgattgccaaaccagatgtggcagtgtgttctttccggcgagttttcttgggcttgggtatgtgcatcagttatgcagccctcttgacgaaaacaaatcggatttatcgcatatttgagcagggcaagaaatcagtaacagctcccagactcataagcccaacatcacaactggcaatcacttccagtttaatatcagttcagcttctaggggtgttcatttggtttggtgttgatccacccaacatcatcatagactatgatgaacacaagacaatgaaccctgagcaagccagaggggttctcaagtgtgacattacagatctccaaatcatttgctccttgggatatagcattcttctcatggtcacatgtactgtgtatgccatcaagactcggggtgtacccgagaattttaacgaagccaagcccattggattcactatgtacacgacatgtatagtatggcttgccttcattccaattttttttggcaccgctcaatcagcggaaaagcatcagtttgctaaggataacagcctccagctccatctatgttcctgcaaaagacatgactcatgcttttttatggctgtacagtattccatggtctcaggctttccctgaatcattgtaagataatggagacgcagcaatgactgttcttgttatcctccccaaccggactaaatgaagacggggcctctgtcctatttattttcctgagcatctaatggtgcctggacacacactgtcattatttgaaaaatgagtacatgttcactctaaagttacaag

SEQ ID NO: 2170 - DNA, 1783 bp, Homo sapiens
atacacagagaaccacgtggaggaaaagcacgcgagtttggagcgggtggagcaggaacagaggtggactggaatgtcacacgacggggcagctggaagggcaccactgagttcagtacttcaaaattgccgtgctctacctctccccagtgcacaaaaacactctccacaccaagctgctgctgctgggggatggagggatggcgtcagcgattcaagactgtttttcctacctgttcagcacttctttcagcgatatgaagttaaatccagaggctaatgatggaggactgctcgagttcaagaccagcctgggcaacatagtgagaccctgtctctacacacacaaaaagccagatgtggtgtcgtgtgcctctagccccagaaggtgtgactcataagactggaaactcctgaacgtagcaaggatgctggcagccaagccaatgactacaaacatgataaagtccattacaaggatggaaagtccacagaacagaaaatgtgtctattttttcaccagtgaccctccagcactcagctatgcctggaacaaggtccaggttggccaatcccccgacacagccgagcccgcatggcacaccacaggccctgtgtgtgaggtctcccggcaggagctgagaggagaggtctggagggagaagggacttggaaccctgcattgggaagcttctggcagcaggacaggccattcctgcaaggcagagtgaggcggctccacaggtgtggaccagcacgtgtttccacacagacacgacaatgtcctaggagggggctgctgacactgattgccatctgcatgccgggtctggtgtaaaagacactgcatgacaaccagccctttccacaccgtgcacacgtgaagatggtgccaatgaaccccacagattctgcccaggaagcactgagagcccagaagagatgacaggcacattcagtgggcctgggcgagccagggaagcttcccgatggaggcagttctgagtggagtctggaggaaaaaaaaaggacagccatcatcagatgagaaacagagggcctggggcaaagggatgagtggtctaggatggctccaggaaaaatcttgctgctctgggaagatgccctgctgctccttctgctctgctctgtggtgattgatggctgtgggttcccgctgtccatattttaccacagcaagagaagaagagggagcgatggatcacctggccactgcccttaccatcacttaaggagcagcatgcggtgaagagagaagaaagaggacctttaccagagtcagcaggagctccacctccactcccctcaactcatggtctagatgaatgattgagtgaggtgagggagcggaggagagggcatgcagaggggcggagaggcatgaaagacaccgaaggacaaagggaaggggcaagaaacagaggcggacagaagccatgggcgaggagaaagcaaaagggaggcatccccttctgaccatgaagggttaaccgctgtagaaattgcccatctacccagcactttgggaggccacggcgagcgatcacctgaggtcaggagttcgagatcagcccagccaacatggtgaaaccctgtctctactaaaaatacaaaaattagccaggtgtggtagtgctcgcctgtaatttcagctacctgggaggctgaggcaggaggatggcatgaacccgggaggcgttgcagtgagctgagattgagccattgtactccagcctgggtgacaagagtgagattctggctc

SEQ ID NO: 2171 - DNA, 2345 bp, Homo sapiens
aaaaatcgattgctctctgccacaaaccggagacccttcttgggcgatccgctttctcagcatgtggaaggtttttctctctctcttctttttctactaaaccttccgctcctaaacccattcctcgtgtgtatccctgtcctgaattctttctcgaccatgacaaagaaccagcttccactgcagagaggtccattccaactgctcagatgaagctgaaaagagcccgactcgccgatgatctcaatgaaaaaattgctctacgaccagggccactggagctggtggaaaaaaacattcttcctgtggattctgctgtgaaagaggccataaaaggtaaccaggtgagtttctccaaatccacggatgcttttgcctttgaagaggacagcagcagcgatgggctttctccggatcagactcgaagtgaagacccccaaaactcagcgggatccccgccagacgctaaagcctcagataccccttcgacaggttctctggggacaaaccaggatcttgcttctggctcagaaaatgacagaaatgactcagcctcacagcccagccaccagtcagatgcggggaagcaggggcttggcccccccagcacccccatagccgtgcatgctgctgtaaagtccaaatccttgggtgacagtaagaaccgccacaaaaagcccaaggaccccaagccaaaggtgaagaagcttaaatatcaccagtacattcccccagaccagaaggcagagaagtcccctccacctatggactcagcctacgctcggctgctccagcaacagcagctgttcctgcagctccaaatcctcagccagcagcagcagcagcagcaacaccgattcagctacctagggatgcaccaagctcagcttaaggaaccaaatgaacagatggtcagaaatccaaactcttcttcaacgccactgagcaatacccccttgtctcctgtcaaaaacagtttttctggacaaactggtgtctcttctttcaaaccaggcccactcccacctaacctggatgatctgaaggtctctgaattaagacaacagcttcgaattcggggcttgcctgtgtcaggcaccaaaacggctctcatggaccggcttcgacccttccaggactgctctggcaacccagtgccgaactttggggatataacgactgtcacttttcctgtcacacccaacacgctgcccaattaccagtcttcctcttctaccagtgccctgtccaacggcttctaccactttggcagcaccagctccagccccccgatctccccagcctcctctgacctgtcagtcgctgggtccctgccggacaccttcaatgatgcctccccctccttcggcctgcacccgtccccagtccacgtgtgcacggaggaaagtctcatgagcagcctgaatgggggctctgttccttctgagctggatgggctggactccgagaaggacaagatgctggtggagaagcagaaggtgatcaatgaactcacctggaaactccagcaagagcagaggcaggtggaggagctgaggatgcagcttcagaagcagaaaaggaataactgttcagagaagaagccgctgcctttcctggctgcctccatcaagcaggaagaggctgtctccagctgtccttttgcatcccaagtacctgtgaaaagacaaagcagcagctcagagtgtcacccaccggcttgtgaagctgctcaactccagcctcttggaaatgctcattgtgtggagtcctcagatcaaaccaatgtactttcttccacatttctcagcccccagtgttcccctcagcattcaccgctgggggctgtgaaaagcccacagcacatcagtttgcccccatcacccaacaaccctcactttctgccctcatcctccggggcccagggagaagggcacagggtctcctcgcccatcagcagccaggtgtgcactgcacagaactcaggagcacacgatggccatcctccaagcttctctccccattcttccagccttcacccgcccttctctggagcccaagcagacagcagtcatggtgccgggggaaacccttgtcccaaaagcccatgtgtacagcaaaagatggctggtttacactcttctgataaggtggggccaaagttttcaattccatccccaactttttctaagtcaagttcagcaatttcagaggtaacacagcctccatcctatgaagatgccgtaaagcaggtaaccatgtgatttgttctttatggaagaatagactgactcaatgaacagacattgtttgatatgattaaacttcacgcagtttgtaaattc

SEQ ID NO: 2172 - DNA, 1951 bp, Homo sapiens
aagttaaggcctttgtccgttgaggtcaggactaggtggtctcagccaatggggacagagcggtcacggggaccgggtttgcgcggctccgaggcctaaccaggcagccgagcctgcctgcgtcccgaggccgccttcccgggacctctgcaccctcaggtcctccgttgggtggtgttcgggcggccgccaggcttcccggcccgccactcccgctgccacccaaaggcgctgcgtgccggcggcttggtggagtttcgtcgaggcccggcaggcttgggccaggagatccagcggccgggcggggtcccggctgagagaggccgatgccgccgtcagtcaccgagatggggtggggacgcttcaaggcctgggtctggccagggggcagtcacagcagggccctagggtaatcactttgatcaacatgacgaaggacacttggaaactgaacaagcatcacttgacaagcctacagaatccataagatggatcattgcttaatttcgggtcttagccagttagatttaccttcagctttaacaaaaaattggccgtcaaaacctgagtcctgtcctcttgccctcctccccggacagcatgaacttcaccacttgctccaccctctccaccaactaccagtccctgggcactgtccaggcacccagctatgtgcccagctggtcagcagtgtggccagtgtctatgcaggcatcaggggctctggttcccggatctccatgtcctgcttcaccagcttccagggcagcatggggtccaggggcctgcccgcagtgatggccgggggtctggcaggaatgggagtcatccagaatgagaaggaaaccatgcaaagcctcaacgaccacctggcctcctacctggacagagttaggagcctggataccaagaactggaagctggagagccaggagcacctggagaagaagggaccccaggtcagagactggagccatgacttcaagaccatcgagaacctgagggctcagatctttgcaaatactgtggacagtgcccacattgttctgcagatcgacaatgcctgtcttgctggtgatgactttagggtcaagtatgagacagagctggccatgtgccagtctgtggagagtgacatccatgggctccacaaggtcattgatgacaccaatgtcacttggctgcagctggaagcagagatcaaggctctcaaggagaagctgctcttcatgaagaagaaccatgaagaggaagtaaagggcctataagcccagattgccagctctgggttgactgtggaggtagatgcccccaaatctcatgaccttgccaaaatcttggcagacattgggcccaatatgacgagctggctccgaagaacttagaggagctgggcaagtactggtctccgcagattgaggagagcaccgcagttgtcaccacgcagtctgccgaggttggagctgctgagatgacgctcacggagctgagacatacagtccagtccttggagatcgacctggactccatgagcaatctgaaggccagcttggagaacagcctgagggaggtggaggcctgttacaccctgcggacggagcagctcaacaggatcctgctgcacttggagtcagagctggcacagacccgggcagagggacagcactaggcccaggagtatgaggccctgctgaacatcaaggtcaagctggaggctgagatcgccacctaccaccgcctgctggaagacagtgaggacttcaatctttcaatcttggtgatgccctggacagcagcaactccatgcaaaccatccaaaagactaccacctgccggatattggatggcaaagtggtgtctgagaccagtgatgccaaagttctgataccttaagccagcagaagcaggggaccctttggggagcaggaggccaataaaaagttcagaggtt

SEQ ID NO: 2173 - DNA, 1817 bp, Homo sapiens
gagttgctggtagtgcccgtggtgcttggttcgaggtggccgttagttgactccgcggagttcatctccctggttttcccgtcctaacgtcgctcgcctttcagtcaggatgtctgcccgtggcccggctatcggcatcgacctgggcaccacctattcgtgcgtcggggtcttccaacatggcaaggtggagatcatcgccaacgaccagggcaatcgcaccacccccagctacgtggccttcacggacaccgagcgcctcatcggcgacgccgccaagaaccaggtggccatgaaccccaccaacaccatcttcgacgccaagaggctgattggacggaaattcgaggagctcaatgccgacctctttcgcgggaccctggagccggtggagaaggcgctgcgcgacgccaagctggacaagggccagatccaggagatcgtgctggtgggcggctccactcgtatccccaagatccagaagctgctgcaggatttcttcaacggcaaggagctgaacaagagcatcaaccccgacgaggcggtggcctatggcgccgcggtgcaggcggccatcctcatcggcgacaaatcagagaatgtgcaggacctgctgctactcgacgtgaccccgttgtcgctgggcatcgagacagctggcggtgtcatgaccccactcatcaagaggaacaccacgatccccaccaagcagacgcagaccttcaccacctactcggacaaccagagcagcgtactggtgcaggtatacgagggcgaacgggccatgaccaaggacaataacctgctgggcaagttcgacctgaccgggattccccctgcgcctcgcggggtcccccaaatcgaggttaccttcgacattgacgccaatggcatccttaacgttaccgccgccgacaagagcaccggtaaggaaaacaaaatcaccatcaccaatgacaaaggtcgtctgagcaaggacgacattgaccggatggtgcaggaggcggagcggtacaaatcggaagatgaggcgaatcgcgaccgagtcgcggccaaaaacgccctggagtcctatacctacaacatcaagcagacggtggaagacgagaaactgaggggcaagattagcgagcaggacaaaaacaagatcctcgacaagtgtcaggaggtgatcaactggctcgaccgaaaccagatggcagagaaagatgagtatgaacacaagcagaaagagctcgaaagagtttgcaaccccatcatcagcaaactttaccaaggtggtcctggcggcggcagcggcggcggcggttcaggagcctccgggggacccaccatcgaagaagtggactaagcttgcactcaagtcagcgtaaacctctttgcctttctctctctctcttttttttttgtttgtttctttgaaatgtccttgtgccaagtacgagatctattgttggaagtctttggtatatgcaaatgaaaggagaggtgcaacaacttagtttaattataaaagttccaaagtttgttttttaaaaacattattcgaggtttctctttaatgcattttgcgtgtttgctgacttgagcatttttgattagttcgtgcatggggatttgtttgagatgagaaaccttaagtttgcacacctgttctgtagaagcttggaaacagtaaaatatataggagcttaaattgtttatttttatgtactactttaaaactaaactgaacattgcagtaatgttaaggacaggtatactttttgcaaacaaatgcataaatgcaaatgtaaagtaaagctgaaattgatctc

SEQ ID NO: 2174 - DNA, 2218 bp, Homo sapiens
aagatggccgagatggcgcggcgcctgcacccgccgtcgccggtcccgcagggcgtgtgccccgcgcaccgcgagccactggccgccttctgtggcgacgagctgcgcctcctgtgtgcggcctgcgagcgctctggggagcactgggcgcaccgcgtgcggccgctgcaggacgcggccgaagacctcaaggcgaagctggagaagtcactggagcatctccggaagcagatgcaggatgcgttgctgttccaagcccaggcggatgagacctgcgtcttgtggcagaagatggtggagagccagcggcagaacgtgctgggtgagttcgagcgtcttcgccgtttgctggcagaggaggagcagcagctgctgcagaggctggaggaggaggagctggaggtgctgccccggctgcgggagggcgcagcccacctaggccagcagagcgcccacctagctgagctcatcgccgagctcgaggaccgctgccagctgcctgctctggggctgctgcaggacatcaaggacgccctgcgcagggtccaggatgtgaagctgcagcccccagaagttgtgcctatggagctgaggaccgtgtgcagggtcccgggactggtagagacactgcggaggtttcgaggggacatgaccttggacccggacaccgccaaccctgagctgatcctgtctgaagacaggcggagcgtgcagcggggggacctacggcaggccctgtcggacagcccagagcgctttgaccccggcccctgcgtgctgggccaggagcgcttcacctcaggccgccactactgggaggtggaggttggggaccgcaccagctgggccctgggggtgtgcagggagaacgtgaacaggaaggagaagggcgagctgtccgcgggcaacggcttctggatcctggtcttcctggggagctattacaattcctcggaacgggccttggctccactccgggacccacccaggcgcgtggggatctttctggactacgaggctggacatctctctttctacagtgccaccgatgggtcactgctattcatctttcccgagatccccttctcggggacgctgcggcccctcttctcacccctgtccagcagcccgaccccgatgactatctgccggccgaaaggtgggtccggggacaccctggctccccagtgactcgggccctcctggaggagtcctgttgcctctcctgcccctccaggccactgagtgttttggccacttggaggacctgggaggagggagtgtgtcctttgagcaagaggaggaactcctggtgcctttctgagcctgcgtgggagaaccccaattctagcactccaggaaactgtgggagagtgtggggcaggctccgtcctccctgggagacccctccagccaccgggtgccacttaatgccaacagcccttaccaaagctgggagccccattgccccggcagctctggcctgtggttccagaagctgagaaaactccactggggcttgcagaatccagggttcacctaagctgcacagttcctgcagctttgccagccccctgaaagtcttgtgtaccccacctctgaagatgctgggggaggcagctgggatgggagccagccccatgcctgtctgtgaccccacagtgggtgagagcccgtcacagtcctgggtgtggctgctctggaagaattaggaggcagccataataagagtcttcagagagatgatgggaggggccagtgaggacaggaacagagagtagatgtcctataataaaggggcttctgggaggtgcctgggcacagatgtctgttcagcaggtgtgtgggcctagaggagagagcagagcccagaaatgtcttttgcaggcccacgttctgacttgaagctttcgtgggcatgttgccattgggttttgcccttgcaaaggcttcctaggtctccagtggcccctcaggacccagggtcccagctgctgcttggggatgtgcactgctggccgccggccttgcagtctctctaccctggggaggaacagtggcttctcagagcctggggcatacagaagaaggcaggagttgatttttgtgttgggtttggggtttctttgtcctcaaggtactgttctgtttctctttacccctctgctttatttattgtaagcattcccacgttaaataaactttggctgttgtctac

SEQ ID NO: 2175 - DNA, 1799 bp, Homo sapiens
tgctaaagaaaaactgaagagcgttaccagaagcaagaatggttgtggcgtcggcaaaattgaatacacgtgcgtatcgacaccgatgtgggatacgttctgagtagttgagggaagacccaaaatcatgccgtcggagctcttcctggaaccgcaccgcggcatgtgtggctccatggagggcgtgacgcaccgtgcagcaatactcgcagcgtggagagttccagccccgaaatggcagcgtcaggcaagctgcttccaatacccctccctccgacaaccagaaacaaatacccagcgcccagatccacaccagcagcaacccagagctccagtctgaggatgagactgttccagggccacagaaaagaggaaaacctcgggcagatggtgagggaagggaacctccgtgttcaggacacctccgcccatccacattcggcctggcaccgatcctgcggaatctctccccaacgcacggtttctacactggaacgattgaaactaagggggtgcgccaactcccccaccttcgcgggtcccctggcaggagacctggtccttgccttaccgcagtaggtgtggctgtgactgaagggagcggcatccctgagcacagtcggagacaaagggaggcgagggccaaccccagcccggaaactctgccctgtaactcggccaaaggagacgccgcattggagcggctgttccgcagcaccatgctgtagaaggtacgttcctctgatgccctgtgcgcaaacccctagccagccttcccacactgccaggataacccttttgaaacctcccctatttgggacaggccgtgctcccaccttttattggagacgaggcgaacctgggcttagggcgccacctagagccaaaaaagaggaagcgacctggccgcgaagcttcgctaggcaaggatgtcccacagaaacccaaacaagccagacagagaaaactggaataaataatccttcattgcaaagacacaggcgtatacccacaaaaacaccagcaagcaggagaccatgacctacgcaaaaggacaaagcaaaaatccagtgactgggcctaacgacatggcgattggtgagctccctgaccaagaattcaaaatagcagttttaaggaaactcagtgatctccgagatagcacacaagcgcatttcagaaacttatcaaagttaacaaaatattaaagtaattttaaaaatcaagcaaatcttgaaactgagaagttcatttgctgaatcgctgaagttcatttgctgatgaactcgatagactctcaacagcagagggaaccaaacagaggaaagtatcagtgagcttgaagactggctatttgaaaatacagccagagggaaaaaaaggaaaaaaataactgaaaggaatgaagaccgccaacaagatctacaaaagtaactcaaaacaccaaatctaagatctacaaaagtaattcaaaagaccaaatctaggaattgttggtgttcaagagggagctgaggccgagcatgtggctcatgcctgcaatcccagcactttgggaggcagaggtgggaggactgcttgaggccaggagttcgagaccagcctggacaacatagtgagacctcgtctctactaaaaattaaaaaaatattagctgggcacaatgatgtgcacctgtagtcccagctactcaggaggctgaggctagaagaccgcttgagcctgagagatgaaggttgcagtgagccgtgatcatgccactgcactccagcatgcatgacagagtgagaccctgtctc

SEQ ID NO: 2176 - DNA, 2283 bp, Homo sapiens
acactggaaagaggggcttggagagggagacagggccagacatgttctagcagagagatggtatattactcccttctcacgctgctaagaaggaatacctgagactgggtaatttataaagaaaagaggtttaattgactcacagttccgcatggctgtggcgggggggcggccacaagaaacttaacaatcatggcagaaggacctcttcacaggacagcaggagagagaacgagtaccagcaggggaaatgccagatgcttataaaaccatcagatcttgtgagaactcactcaccatcacaagaacagtatggggaagcagcccccttcattcaattacctcccgccggatccctcccacaacacatggtgattatggggattacaattcaagatgagatgtgggcggggacacagacaaaccacaggagatgtgtgaagattgcttgtggcttatcagtggtccctttctgccttaagggtgatggaatcaaaaagaacttctccatccttggctttgatatttcaggcgcacaaacaaggcctcattcacccttcccagagctgatccactggcgtgatttgctctaatgccaacatcaccacccctccccagaggccctgccagcctctactctcccaggaagtcagccccactctgctggctagtcctggctctctactgtctttctgggcccatcatggctccctgaccacccaactctgaaacaatctcccggtccagggcatcccaggaaccaggtcattgatggagccgctatttggcagttgcaggtggggcaggaatggtatggggaagtagaggcagaatgaaatggcctggaagaagttaccctttttggatgagttcaaaacccctagggctgatgcacccaacccctgctctgtcattcgtgacctgctctttctagagcaaaatatcatgggatgggagggccctctgaatcttttcctgtgaagttgactttgatgatatgttggtccttttgtcaagcctgagctgctgtggtctgatgctgagtgtctcacctgtaacatctcagcacataacactccacagtgagagccttccttctgcccctgggagggagagctttacagaagtatttccaagcaaatttccagaaggcctcaaagtaagcagcagaagccgctgctggtgtcagcagcaaatcagcactcagcttgaggcctcccagcctgccccgggaggggcacggctcgcagcctttgcactctgggttctttccagggaggatcccatggggcacttccaggaaggagcccctgctgctttctccaaagagctctgcttcgggtctctaaggattggttttatctgcagagaagctaaaggaaggaatctactggtcccctaaggacctgatgacacatgcacagagatcccatctctcttttcattccctgaagtaagggaggcaatgaagccatacgtgtaccacaaagagtgtgagaaagaaggaactctccagccggggtctttctctgagtcatttttcagtcgtagggtacaaaaagctccaggttatattcaaggttttattttttccagagtatcttcggggaaaaaaagtatatctgaaaatcacagaaattcttttctttcaaggtaaattagaggatttgaaggggcagtgctggatgatctctgggttcccctctagtccaacacccagactctgagattgcttccctgtgggagctcggcctggcctccttccatgggcgtttcttccaacgtggaggtttgtcagtggcgtgcctgatggccagggccagatgctgttcttcacaccagaacgtcataatttaaaatgtctatgctctgaagcaagaaatcagagcttcaaacctaaaacttgtaggatttacaaagcagtttcattccaccaacatctattgagtactcattatgggccaggtacagagatgagaagtgggtctgagaacagtccctgcccccaagtagttcacaaatctcattgtgaagaggcaggcacagaaaatctatccatctggtagcggccaacccaagccaggtaggcaatactttccctcatagagttagagggtagtttaaagaaactgccacccagagggaacggcggtgaggttttaggaattatgattcctttcctaaatttctttgctatttgttatgagctacacaaatgtttatacacaagtcttaaagttttggctgattagaatattctcaataaagagagaatttctactt

SEQ ID NO: 2177 - DNA, 2483 bp, Homo sapiens
atccccattgttgcatagctgggaaagggagctggacaacctggtaccttttcgattatggattcaaatgtctctgaagtattgacaggatttcaccatgttagccaggatggtctcgatctcctgatctcgtgatccacctgccttggccccccaaagtgctgggattacaggcgtgaaccaccacaccagcctaaagcagcattttttggtgtgtctgtaagggtgtttcaagaggagattgctgtgtgagtctgagtggacaaagttcaggaagatctgccctcgatgtgtgaatgagcaccatcaaatcagctagaggcccagacagaacagaaacagaggaaagagacagagtcttgctatgtaacccaggctggtctcgaactccggcttcaagcaatcctcctgcctcagcctcccaaagtgctgggattatagaccggacactaagacccagcgctgaggacaaaaggaagcaagctctgcatattcgaagtgttgcaaactagggtccatcctctgggccagccctctcctctagtgacttactcagagtgtgttggatataaagtcatgaagaactggggagttataggtggaattgctgctgctcttgcagcaggaatatatgttatttggggtcccattacagaaagaaagaagcgtagaaaagggcttgtgcctggccttgttaatttagggaacacctgcttcatgaactccctgctacaaggcctgtctgcctgtcctgctttcatcaggtggctggaagagttcacctcccagtactccagggatcagaaggagcccccctcacaccagtatttatccttaacactcttgcaccttctgaaagccttgtcctgccaagaagttactgatgatgaggtcttagatgcaagctgcttgttggatgtcttaagaatgtacagatggcagatctcatcatttgaagaacaggatgctcacgaattattccatgtcattacctcgtcattggaagatgagcgagaccgccagcctcgggtcacacatttgtttgatgtgcattccctggagcagcagtcagaaataactcccaaacaaattacctgccgcacaagagggtcacctcaccccacatccaatcactggaagtctcaacatccttttcatggaagactcactagtaatatggtctgcaaacactgtgaacaccagagtcctgttcgatttgatacctttgatagcctttcactaagtattccagccgccacatggggtcacccattgaccctggaccactgccttcaccacttcatctcatcagaatcagtgcgggatgttgtgtgtgacaactgtacaaagattgaagccaagggaacgttgaacggggaaaaggtggaacaccagaggaccacttttgttaaacagttaaaactagggaagctccctcagtgtctctgcatccacctacagcggctgagctggtccagccacggcacgcctctgaagcggcatgagcacgtgcagttcaatgagttcctgatgatggacatttacaagtaccacctccttggacataaacctagtcaacacaaccctaaactgaacaagaatccagggcctacactggagctgcaggatgggccgggagcccccacaccagttctgaatcagccaggggcccccaaaacacagatttttatgaatggcgcctgctccccatctttattgccaacgctgtcagcgccgatgcccttccctctcccagttgttcccgactacagctcctccacatacctcttccggctgatggcagttgtcgtccaccatggagacatgcactctggacactttgtcacttaccgacggtccccaccttctgccaggaaccctctctcaactagcaatcagtggctgtgggtctccgatgacactgtccgcaaggccagcctgcaggaggtcctgtcctccagcgcctacctgctgttctacgagcgcgtcctttccaggatgcagcaccagagccaggagtgcaagtctgaagaatgactgtgccctcctgcaaggctagagctgatggcactgtctgcactgtccaggaaaaaagtaaaactgtactgttgcgtgtgcaagcggccccactagagccttccagccttctggtgtgttctaagagcaggctccacctgggagccagccccagttcacaccaaaccaggctccctgaacagtcctgttcatgtgtgtaggtggttctgttgtgttaagaaagcattcattatgtccggagtgtctttttactcatctgatacaggtaattaaaagaactcagattcttgaagccaccgttttcatattgtaatgttaggtgttctcagaggggaggtacctttgtctaatcaacgtttccacttagatcttttatttttaataagcaggcccataaaaattgttgacaagaattaatgaaattattaaaggcaacaatttagaag

SEQ ID NO: 2178 - DNA, 2506 bp, Homo sapiens
accgctggactcccgtgtccctccgcgcaggcgggcggccccggagcgctggtgccggcagaggcggcgacggtggcgcccctcctcatcatgaacagaggcttctcccgaaaaagccacacattcctgcccaagatcttcttccgcaagatgtcatcctcaggggccaaggacaagcctgagctgcagtttcccttccttcaggatgaggacacagtggccacgctgctagagtgcaagacgctcttcatcttgcgcggcctgccaggaagcggcaagtccacgctggcacgggtcatcgtggacaagtaccgtgatggcaccaagatggtgtcggctgacgcttacaagacggcgtggcggctggactgtgcccagctcaaggagaagaaccagtggcagctgtcggctgatgacctggctgcctactgccgccgccgggacatcagaattcttgtgcttgatgacaccaaccacgaacgggaacggctggagcagctctttgaaatggccgaccagtaccagtaccaggtggtgctggtggagcccaagacggcgtggcggctggttcctgaccaagaagagctctgagaccctccgcaaagccggccaggtcttcctggaagagctggggaaccacaaggccttcaagaaggagctgcgacaattcgtccctggggatgagcccagggagaagatggacttggtcacctactttggaaagagacccccaggcgtgctgcattgcacaaccaagttttgtgactacgggaaggctcccggggcagaggagtacgctcaacaagatgtgttaaagaaatcttactccaaggccttcacgctgaccatctctgccctctttgtgacacccaagacgactggggcccgggtggagttaagcgagcagcaactgcagttgtggccgagtgatgtggacaagctgtcacccactgacaacctgccgcgggggagccgcgcccacatcaccctcggctgtgcagctgacgtagaggccgtgcagacgggccttgacctcttagagattctgcggcaggagaaggggggcagccgaggcgaggaggtgggcgagctaagccggggcaagctctattccttgggcaatgggcgctggatgctgaccctggccaagaacatggaggtcagggccatcttcacggggtactacgggaaaggcaaacctgtgcccacgcaaggtagccggaaggggggcgccttgcagtcctgcaccatcatatgagtgttctcaccaccacttatgcccctagaagggaaggggagagggaaacgtgccctctgtttgatccttgttttgtgacatttttttttttttttttttactcaaagttaacctacctgtaactttttaaaaacttgtaaaataactgaccctcccttcctgtccgccctcttcccctctaatgctcacgctcccaacacaaggtgggcagggaggcaccattcaggaacctggaccaaagctaacgaggctgggccaagccagggatggggccacagccagaaccccgagccctacttccaggttctggttagctcagccccagcccagcccagctgctctgcccagagctgggtgagtggggagacacctcagagccccgcaaaacccactgaccggaggcaaaaggcagtggggctgggggtagttttccatggtcacagagaactagtggtggctctgagaaggggaggacctctgggctttgattccatctccttgtcttttttctttgtttttagagacagggtcctgctatttcccaagctggagtgcagtggtgcgatcatggctcactgcagcctcgaactcctgggctcaagcaatcctcctgagtgatcccatttcttaatcagtgtagccccaagaaggctggggctatttaccagggtagaaaaaggagcttacctcccacctttggtcctaagtccctgccccctccccttcacaccataactaggtaacagtttgataactagggaagaaagcagaacagttaagcagccgccacatccccgctggctgggggcctcactccaggaaggggctggactggctgtcctttccagtggcctggctccgctgtgtggatggggagatcggggccagaggcagaaccctggtgaggaagctccagtcctgctctctacccagcccatcttgcctccatggtgcctctggaggcctctgggcctcctctaacaggggctggtgggcaccaagagccaatggagtagacccctggctggtaagggccaagtcccaccggttgcttctgggaaggggtttctaacactagtctgtgtgctgtggttcctggggtgccctccactgccctctgttcagtaacagggccttgctaatcgggttgtcactcaacaaaagtgctttggatttaagttactatcctggctttgcccaacctcagcaacctgtaagactgataatgaaataaatcatgttaatcct

SEQ ID NO: 2179 - DNA, 1632 bp, Homo sapiens
acttttccccaactgcagtaccctctgatctctggctttcttctctcctgctcaggacctcatctattccagcccagtggacacagctcacaaggtactgattagcctgaggaccttcctgaggaggaatgaggatatccaagtgggcggtcttatccgaggccacttcctgctgatcctgcagcgtctgctagtggagcatggggcatccccatcaggagcctcggggaacctaccattgctgctgagcctcctctccctgatgcagctcaggaatgtgtcagagcaagaactggacagcgtggccatgaagctccttcaccaaggtgccctggctgcttgggatagcgcccaagggcccagggctggacgtgcagtgggtgctcactaataagcaagctgtgtgggaagtgcagccccactgacgtggacatcctgcagccctccttcaacttcctgtattggagccttcatcagaccacacccagcagtcagaaaagagctgctgcagtgctcctgagcagcacaggcctgatggagcttctggagaagatgctggccctcaccttggcaaaggcagattctcccaggactgcactcctctgctctgcctggctgctcactgcctccttctctgcccagcagcacaagggcagtttgcaggttcaccagacactctctgtggaaatggaccaagtattgaaggctctcagctttccaaagaaaaaggctgcactactctcagctgccatcttatgcttcctgcggacagccctgcgacaaagcttttcctctgccctggtagccctggtgccctcaggggcccagccactgccagccaccaaggacactgtcctagctccactgcgaatgtcgcaagtccggtccctggtcattgggctgcagaacctcctggtgcagaaggaccctctattgtcccaggcctgtgttggctgcctggaggccttgcttgactacctggatgcccggagcccagacattgccaataggagaaggtcctcttgagcaatgtcccaaggcaaggtcttggaagcattaacaacccagtgtttcttgaagctctccacgtggcctcccagccttggaatcggtttttgctgtttaccctcttggatgctggagagaattccttcctcagacctgagattttgaggctcatgaccctgtttatgcggtaccggagtagcagtgtcctctctcatgaagaggtgggtgatgttctgcaaggtgtggctttggctgacctgtctaccctctcgaacaccacactccaggccctgcatggcttcttccagcagctccagagcatgggacacctggctgaccacagcatggcccagaccctgcaggcctccttggagggccttccccctagcacctcctcaggccagccacccctgcaggacatgctctgcctgggaggggtggctgtatccctgtcccacatcagaaactgatcctcaggacttgaaggcccagaagtggagagagaatgagacctggagacaaagggcataattgttggggaaatggatgacagctgaagctattcatatggagccatatactctattgttgaaatagaataaggaaataaaatgatacactcac

SEQ ID NO: 2180 - DNA, 2879 bp, Homo sapiens
acaaacgccggcgctgacaggggccgccagcccctccgccgcgcggagcccacgaaggggacagcgcagccggcccagagctcgggtctccggggaccgagccttatgatctcctcattgcgtccccctctgcccactggacttggacttcagatctgaccccagacctgccggctacctcgggagggcccacctccccgcccatccagcaagatgccaatcctcaagcaactggtgtccagctcggtgcactccaagcgccgttcccgagcggacctcacggccgagatgatcagcgccccgctgggcgacttccgccacaccatgcacgttggccgggccggagacgcctttggggacacctccttcctcaatagcaaggccgcggagaagggcaccagtaagctgcccaagagcctgtcatccagccccgtgaagaaggccaatgacggggagggcggcgatgaggaggcgggcacggaggaggcagtgccccgtcggaatggggccgcgggtccacattcccctgaccccctcctcgatgagcaggcctttggggatctgacagatctgcctgtcgtgcccaaggccacgtacgggctgaagcatgcggagtccatcatgtccttccacatcgacctggggccctccatgctgggtgacgtcctcagcatcatggacaaggaggagtgggaccccgaggagggggagggtggttaccatggcgatgagggcgccgctggcaccatcacccaggctcccccgtacgccgtggcggcccctcccctggcaaggcaggaaggcaaggctggcccagacttgccctccctcccctcccatgctctggaggatgaggggtgggcagcagcggcccccagccccggctcagcccgcagcatgggcagccacaccactcgggacagcagctccctctccagctgcacctcaggcatcctggaggagcgcagccctgccttccgggggccggacagggcccgggctgctgtctcaagacagccagacaaggagttctccttcatggatgaggaggaggaggatgaaatccgtgtgtgaggcggacagtgggtggccaccgggagctcttggctgcatcttctccctgcccccaccccactatgacctttgaccctacggcgcaggggcagccaggacccttgattcagaccatggaccctggaccttgtagatgagggacactggcctggccctcgggtcttcggaggacgtagggggctggcatgggtgccgactggctgcctgacttcatcacgctccctgcacttaggctgcgtgggacaagggctgtgttgtcacagcaggaataggttttcctctgttggcctccctttcctccaccctggcctcaaatggatgccagatgccaaccccagttctggccacgtacagccagcgggtcagcccagaggcagcctcagctccagggctaaggactctcggctcccattttctctgctggcgtttctgctgtgcccagcagtggctgctggggaagcagctgcagcaggagggagacggtcttgcctctcagcccctccctgccccaccccagctcctgccctggaaatctggagccccttggagctgagctggacggggggccagctgcgagcatgtgcactaaacgcagccctttccaggggaagagagcaggatggagaatggaaggaaagccccccaggcttcgtgaattgcaagaagggacccttccaggatgacactaggaacagggctagggcactcgctcagtccctaggggcttgtttgttctttattattgtgtttaaatccttatagagcaatatcaggatggtgttaataggtctgcctcagaatgagaatcaatccttttagaaaacctttatactaagcctcctcttcaaaattcacagtggcgattagcggactggagtctggtggcgattagcggactggagtctggggacatccgtggcaaagacaccagctcaactttagtgcttcccaactttatttagaatgacatggggtgggtgtctggtgtgtgtgttttccctacgcacctcccatagctattaacaactgaggaaggccagtgcagaatatttttggagaacgattttttttttaaataatatatcattcctatggggggaaagccttttttttctttttggctgagttattccctccctcccctcaataccctcagtactgactacttccctttcttttctcaggcctccccccaccgacttttgaggccagggttggccagatttagcaaaaccaaaacagagtgctgagttaaacgcaaatttcaggtaaacaaaagataattttctagcattaatatgccccacgcaatatttggaacacttatgtgaaaaatgatttgtttttctgaaatttacgtttctctctgagtcctgtaactgtccccgaggggattgagcagaagctcgggtatgagccctgaggttgactgccggttatttttctgtcctgggaacagcctgacccacctccctgtctccatgtagccagtggggggagggggagacacagaacctaccacagccaggggcgtccccatggcgactgtggcccggcccctcctctcttgcctgactctcctctcttgcctgactctagacactaacttagttccaggttcggtgccctgttggtgctcctgtttccaatagcttaggtcccatggtgggggaggaacctcaggggctatgcagcccccgccagctgccctcaaatcccgtccaggccagttccagattctaaactgatttttttcatgatattgtcaaaacagtgaggaaacattaaaaaaaaagccctaaagc

SEQ ID NO: 2181 - DNA, 1743 bp, Homo sapiens
gtgtgagaatttggcagcgggtgagaggaccagacctcctggggcagggcggggggccaggagagatgtcgggggcaagagccaaagggcaagagattctcggtagtcctagagggcctctgaggagtcgatgatgagcgatcaatgactgtatttttaaattcattgacacccaaattctatgtggcacttacagggacctcttcattgatatcaggactaatatttacatttgaatggtggtacttccataagcatggcacatcttttattgagcaagtatctgtaagccatttgcaaccactgatgggaggaacagagagcagcatttcagaaccaggttctccttcgaggaacagagaaaatgaaaccagcagacagaatttgtcagatacacttgggtgactggtaaagagccacttacatactatgacatgaacctgtcagctcaggaccatcagacctttttcacctgtgacacagattttttacgtccttcagacacagttatgcagaaggcttggagggaaagaaatcctccagctcgaatcaaagcagcctatcaagctttagaattaaacaatgactgtgccactgcatatgttctactggctgaggaagaagcaacaactattgtagatgctgaaaggttatttaaacaggcactcaaggcaggagaaacaatttataggcagtcacagcagtgccagcaccaaagtcctcagcatgaagctcaactgaggagagataccaatgtactggtatatattaaaagaagattggcaatgtgtgcaagaaaattaggaagaataagagaagcagtaaaaataatgagagatttgatgaaagaatttcctcctcttaccatgttgaacatccatgaaaatctcttagaatcacttttagaattacaggcctatccagatgttcaggcagtcctagcaaaatatgatgatataagccttccaaagtcagcagcaatctgttacacagcagcactgttgaagacaaggactgtttcagaaaaattctctccagaaacagcctccagaagaggattaagcacagcagaaattaatgccgtggaagcaattcatagagctgtggaatttaatcctcatgttccaaaatatttattagagatgaaaagtttaattttacctccagaacacattctgaaacggggtgatagtgaagcaattgcctatgctttctttcatcttcagcactggaaacgaatagaaggtgctcttaatctgttacagtgtacatgggaaggcacttttagaatgattccatacccgttagagaaaggacatctattttacccttatcccagctgcacagagacggctgatagagagctattacctacctttcatcatgtttctgtttacccaaaaaaggagcttcctttgttcatccatttcacagcaggattttgctcttctacagcaatgatagccattctcactcaccagtttcctgaaatcatgggtatttttgctaaagctgtgctgggactctggtgcccccaaccctgggcatcctcaggctttgaggagaatacacaggatttgaagtcagaagacctaggtttgagttctggctgagccacgcactgttcatgtgaccttggacaaatcaccaaatttttctgaacagcatctgtaaagtgacagtaacccctacctcacagggttgttgtgaggattacatatatgctaaagcattttgcatatg

SEQ ID NO: 2182 - DNA, 1958 bp, Homo sapiens
gttgttcactcgcgcgtcgagcacacggtgggtccggcggcgggttggcgccccaggcggcgttccctgtggcctggcgcctgggccgctgccctgagcgggttccgccccagagcccgaccctcctgggggctctaggcggagtcccgcgagccgagggggaccggcgaccgctgccgaagcatgaagaaggggtaaggcgtgagcccccaagatttcacggtgttacaatccaaaatacatagttgtgatcatttataagtgttggagaaatcagcatgttaaaacaactgttgatgatagctgttggagtaaagttgcagtggaagctatggctgcaaaatcgttaaaatcttcaaggtgaactggcacaaaggttaatctcaagatgccgctagtgaaaagaaacatcgatcctaggcacttgtgccacacagcactgcctagaggcattaagaatgaactggaatgtgtaaccaatatttccttggcaaatataattagacaactaagtagcctaagtaaatatgctgaagatatatttggagaattattcaatgaagcacatagtttttccttcagagtcaactcattgcaagaacgtgtggaccgtttatctgttagtgttacacagcttgatccaaaggaagaagaattgtctttgcaagatataacaatgaggaaagctttccgaagttctacaattcaagaccagcagcttttcgatcgcaagactttgcctattccattacaggagacgtacgatgtttgtgaacagcctccacctctcaatatactcactccttatagagatgatggtaaagaaggtctgaagttttataccaatccttcgtatttctttgatctatggaaagaaaaaatgttgcaagatacagaggataagaggaaggaaaagaggaagcagaagcagaaaaatctagatcgtcctcatgaaccagaaaaagtgccaagagcacctcatgacaggcggcgagaatggcagaagctggcccaaggtccagagctggctgaagatgatgctaatctcttactcactttctgccttgtcatttagtcagatgagtgagcttctgactagagctgaggaaagggtattagtcagaccacatgaaccacctccacctccaccaatgcatggagcaggagatgcaaaaccgatacccacctgtatcagttctgctacaggtttgatagaaaatcgccctcagtcaccagctacaggcagaacacctgtgtttgtgagccccactcccccacctcctccaccacctcttccatctgccttgtcaacttcctcattaagagcttcaatgacttcaactcctccccctccagtacctcccccacctccacctccagccactgctttgcaagctccagcagtaccaccacctccagctcctcttcagattgcccctggagttcttcacccagctcctcctccaattgcacctcctctagtacagccctctccaccagtagctagagctgccccagtatgtgagactgtaccagttcatccactcccacaaggtgaagttcaggggctgcctccacccccaccaccgcctcctctgcctccacctggcattcgaccatcatcacctgtcacagttacagctcttgctcatcctccatctcctccatcacaagttatacctgcttctgagccaaagcgccatccatcaaccctacctgtaatcagtgatgccaggagtgtgctactggaagcaatacgaaaaggtattcagctacgcaaagtagaagagcagcgtgaacaggaagctaagcatgaacgcattgaaaacgatgttgccaccatcctgtctcgccgtattgctgttgaatatagtgattcggaagatgattcagaatttgatgaagtagattggttggagtaagaaaaatgcattgataaatattacaaaactgaatgc

SEQ ID NO: 2183 - DNA, 2028 bp, Homo sapiens
gtctcctcgaacaggaaccccgaggatgatggctgtcttctcaaacaggagccccggggatgacggctgtctcctcaaacagggaccatgaggatgatggctgtcttctcaaacaggagccccgaggacgacggctgtctcctcaaacagggaccccgaggacgatggctgtcttctcaaacaggagccccggggacgacggctgtctcctcaaacaggagccccggggatgacggctgtctcctcaaacaggaaccccgaggacgacggctgtctcctcaaacagggaccccgaggatgatggctgtcttctcaaacaggagccccggggatgacggctgtctcctcaaacaggaaccccgaggatgacggctgtctcctcgaacaggagccccggggacgacggctgtctcctcgaacagggaccccgaggacgacagctgtctcctcaaacagggaccccaagaatgacggctgtctcctcaaacaggaaccccgaggacgacggctgtctcctcgaacaggagccccggggacgacggctgtctcctcaaacaggaaccccgaggacgacggctgtctcctcaaacaggaaccccggggacgacggctgtctcctcaaacaggaaccccgaggacgacggctgtctcctcaaacaggaaccccggggacgacggctgtctcctcaaacagggaccccgaggacgacggctgtctcctcaaacagggaccccggggacgacggctgtctcctcaaacaggaaccccgaggacgacggctgtctcctcaaacaggaaccccggggacgacggctgtctcctcaaacagggaccccggggacgacggctgtctcctcaaacagggaccacgaggacgacggctgtctcctcaaacaggaatcccgaggacgacggctgtctcctcaaacagggaccccggggacgacggctgtctcctcaaacaggaaccccgaggacgacggctgtctcctcaaacaggaatcccgaggacgacgactgtctcctcaaacagggaccccggggacgacggctgtctcctcaaacagggaccccgaggacgacggctgtctcctcaaacagggaccccggggacgacggctgtctcctcaaacaggaaccccgaggacgacggctgtctcctcaaacaggaaccccgaggacgacggctgtctcctcaaacagggaccacgaggacgacggctgtctcctcaaacaggaatcccgaggacgacggctgtctcctcaaacagggaccccggggaggacggctgtctcctcaaacaggaatcccgaggacgacggctgtctcctcaaacagggaccacgaggacgacggctgtctcctcaaagaggaatcccgaggacgacggctgtctcctcaaacaggaaccccgaggacgacggctgtcttctctaacaggagccccggggacgacggctgtctcctcaaacagggacccgaggacgacggctgtctcctcaaacaggaaccccggggacgacggctgtctcctcaaacagggaccccgaggacgacggctgtctcctcaaacaggaaccccggggacgacggctgtctcctcaaacagggaccccgaggacgacggctgtctcctcaaacaggaaccccaggaacttcggaagccagaagcagacactgccctctgaccactgctgccaggagaacgtttgagacctcttcttgggtgctttaagctgacatgtccaccatcaagtcttctcactgtggggacagcttccccaacatccatgctgccgggtcttccgccagccatgccgcctcctgagtctgtattccatgccgggtcttccgccagccatgccgcctcctgagtctgtattccatgccgggtcttccgccagccatgccgcctcctgagtctgtattccatgccgggtcttccgccagccatgccgcctcctgagtctatattccaccctttattccatcacatgtaaaaacaagtgaccttcctttccccacc

SEQ ID NO: 2184 - DNA, 1781 bp, Homo sapiens
aagggcttctgaccttgcagtgagcttgttggcactgcctgtccggggaccctggggctgctgttcctgtggtaatgtggcagctgggaccatggccagcttcagtctgcctggcgtcacataagccagcccacagggtcctgcagcttgtcctttctggctggaagctctgggcatagcctgggactgggtctttccagagagggctgtagccagggccctgcccgcctcgggggccacagcggctctcacaccagcatcttgctggataggagcagttccaggactctctgatcacacctgatcatcgtcactgccagaattcaaggtagctgcctgccatggctgagaggtgtgcctcagcttaacccactcagtgatggactccagtgcctgcaagaagtctcaccagagtaagaagtggaggatccaggcccaggagaattttgccaagaagtttccgtacaggttgtcgtggctgacagagcccgaccctgagcccctgcagccctgggaggtcacaaacgactcgaacacggtgcagctgcccctgcagaagaggttggtgccaacgaggtccatcccagtccgaggggttggtgtgaggattaaaaagagcatgaatgtcacttctaggactttatcccaaatgtacactcacacaggcaagtgggccccatttcactgacccatgaggaaataccagcccagggaaggagagcagagagagctgctcaaggccatgcgattgctgcacacaggacacccgcacacgtcatgttgcaaggcctcctctgccaatcaagataccgggtgaaacaccacactagaaacctacagcagaagcacgaccatcctcctctgcacacccacctcagccaaagcagggctcgcgccctgtgcagggattgccaattcctgttctgcagagccacccacctgccagcttgcctcttctcacggtactttctggaggtcctctgaacttgggacactccagcagtacctgaagatggacagcagcatggggagcatctaccaatttggctccagcagccacttcccctccctttgcccacccaccagaggaggatggctgccaggccttcagcccatgtgattccgataggctcccctacgcctccaccacctgctgggataggcatgtggcctaggcctgtccaatcacagcctcccagcccttcctgccacctgactggctcagagacgggcacttgagacccagaccgggccaatggatgcctccttgggactttggctggaatcagtggcaaaggaaccctctctagctttgggttggagttgctgaactggtgcagctgagagtgaggctatggcagagaaaagctaaaccacagctggaggtgtgatctgaaccccaagatctatgcctgtccgaggcagaggcacctggccttttcagtcacaggcacagacccactccctcccagctgaagggagtctgaattgggttgggtttgtcctcgccgaggctaccactgtgtgccattgggtggcccacagtcttagcttccttgcctgcctaggggtgagcaggggctgggatgggatgcagaggcccacctggctccaagaggaacacctgtgactccaaacactgggacagatgctcagccctgcagccacgggagtggaataggggaagggggctggtgccaacactgctcccgccggtgtctcagaggcagaagacatagagctgagatcttgggttttcatattaaaaatgtaagctcctc

SEQ ID NO: 2185 - DNA, 1714 bp, Homo sapiens
aatgtattatgatgtaggggagggaggaaggagggccagggtagggggcacaccctctccctgaatgaaattcatttaggggcactgtctgctcgcatgttctgttctgggagaaaatgggtagcagaagctacaatttgtactaagctaatgaaaagagagaaaagaagaatggggaagagaagggcaaagaaggcaaaaagagaagagaagaaaaagggaggagagagaaggagaaatgagaaaagaggaaaccgaatgaagaggatgtgtgagagaaaaaaatatgaaacagacctagaggatcaagacataatgggagcatttttagacaagccaaagatggaaaagcataatgcccaggggcagggtaatgggttgcgatatgggctaagcagcatgcaaggctggcgtgttgaaatggaggatgcacatacggctgtgatcggtttgccgagtggacttgaatcgtggtcattctttgctgtgtatgatgggcatgctggttctcaggttgccaaatactgctgcgagcatttgttagatcacatcaccaataaccaggattttaaagggtctgcaggagcaccttctgtggaaaatgtaaagaatggaatcagaacaggttttctggagattgatgaacacatgagagttatgtcagagaagaaacatggtgcagatagaagtgggtcaacagctgtaggtgtcttaatttctccccaacatacttatttcattaactgtggagactcaagaggtttactttgtaggaacaggaaagttcatttcttcacacaagatcacaaaccaagtaatccgctggagaaagaacgaattcagaatgcaggtggctctgtaatgattcagcgtgtgaatggctctctggctgtatcgagggcccttggggattttgattacaaatgtgtccatggaaaaggtcctactgagcagcttgtctcaccagagcctgaagtccatgatattgaaagatctgaagaagatgatcagttcattatccttgcatgtgatggtatctgggatgttatgggaaatgaagagctctgtgattttgtaagatccagacttgaagtcactgatgaccttgagaaagtttgcaatgaagtagtcgacacctgtttgtataagggaagtcgagacaacatgagtgtgattttgatctgttttccaaatgcacccaaagtatcgccagaagcagtgaagaaggaggcagagttggacaagtacctggaatgcagagtagaagaaatcataaagaagcagggggaaggcgtccccgacttagtccatgtgatgcgcacattagcgagtgagaacacccccagcctcccaccagggggtgaattggcaagcaagaggaatgttattgaagccgtttacaatagactgaatccttacaaaaatgacgacactgactctacatcaacagatgatatgtggtaaaactgctcatctagccatggagtttaccttcacctccaaaggagagtacagctcaactttgttgaaacttttaacatccatcctcaactttaaggaaggggatatgacatgggtgagaatgattacatcagagaacttcagcagtacaacagctagcccagaactgattttttttttttttttttgtaaatttgagacttatgtaagcgtgatttcaaaccataattcgtgttgtaaatcagactccagc

SEQ ID NO: 2186 - DNA, 1854 bp, Homo sapiens
tttttgcctagtgcatcccctgccagggccatgggcgacctgcctcccagtcctgccctgcacgccagcactcctcagctcttctcagcttttgggcggttgatgggaccaggtgtcctggagcagagagcggcactcgtcagggattctaccgcagtgcaggaacccaggcggcggggaggctcgggcatggcctgctgcaggtccccagccctgccccacggggaggtggctgaggccaggcaaaaattccagcgtgaagtgagtgggccagcagtggtggggggcccggcgccccctccacagctgctggcccaggtgctaagcccctcactgcctggggccagcagtgccggccagccgctctgagtgcagcctgctgagcccacccccaccaggagctcgcactggcccgcgattgcggcgctcagcagccccggttcccgcccaggcctctccctccacacctcccgacaagcggaaggagctggctccggcctgggctggcccagagaggggtaccccacagcgcagtggcgggctgaaggctcctcgagcatggcaagagtggaggccagagcaaacgccaaggccgaggaggcgctgagagcgagcaagggccgccagcacgttgtcacatctcgagggtaccagaaattacttttcattatgagaaactttaaaaattggaaaattaagaatcttatcaatctataagatctgcttctgtcttatgtctatttctatatgtttatatgtgtcgcgtgtgtgatagttcactaccaaaatgtatataagggctctgatcaattggcttaaagaagagtaagcatttagattaaataagactttttcagaaaatcacaacttaaatgttttttggttcgaatgactttggtattctttggtaaataaagatagttttaaattattggtaaaatagaaacattttcagaatttagacatttggtctgaattgggcagatctgatactgtctgttagattatttaaagtcataacttcttctataacatttctgataattgttcaacctgtctgttttagagccattagattccaggtaaagtcgggacatgtggagctagccatgccccttggttatgctgggaaaagtcagacatcgtctgaagctctgttctttgctctggctctgcaccagtacataattaaaatagcctatctcctaggtttttcactaaaattaaaagttactaagagttaacattgtagtatatgtaattataactactggagaaacagttttacatgcagaggtaaaatttaattttctcttttggacaagattttcatgtaatagtgacagataatgaaagaattttgtttgccttttgagtaaagtgtaaaaaaaatgaagtggggacggagggagagagaacagactcgaattcagttgacctcatgatgtcttaattgggtcttgttctttggaaagtggagtcttcactctatcaaagaatggctttttgaaagttttcagttatcactttggcgaaatgaataatctgtgatactgattgttgatatcaggtgtcttaaacctttgatatttgacaaacttttcaaaataaaattctaaattcagccttttgatctttaatttttctgagagggctaagagagacatgtgtttgactgatttgttacatgaagattatacagaaagcactgtcagatataaaaaaatgtttggctttctttggattgtatttgtatttaaccatagctgttctgagacttttgtcatccataattattgttttactttgagtcttcttagaaagtgatttactaaaagttacagttcagaactt

SEQ ID NO: 2187 - DNA, 2889 bp, Homo sapiens
agatcctgtggttcactgtgagacctccgcctctctcgtctgcctcacgctgccccctcgcacccccaaggtatgacggcatttgaacaatgcacgtgcccatctagagccttggggtgggcctgtgagagagtggccgcccaccccagtccccaccaggtgcatagtcctgcggctaagtcagggcggttgtaacaaaggctcagaccctccaactaccaggctgtgttgtgacgaggctgctggagccccaggcaccatgacgggaatgggtgaatccacccacagtgggtgactctcaatgtgatactagcccggtacacttagacacccaaaaatcaacgcggcagacgttgtatccccaggagaaggacccccccgaacagacacgtgggacaatggcaagcatggccatccctgaggacaatggcaggacccagagtgcctctctcctcctcaaggcatgaactggcccctccagatacagggacaaccttttcttcccacctcggcctgtaacagacacgacacaggccatacccttggctagagtcactgcaacatgatccagagggtgactgtgaaaggagccagcggggctgctgtgtcggttttcctggagacacggaaatgggtacaaacttaaaacatctgggcagaggtctttgggataaagtccagaaaatcacagctggctccatcattcaggaattgatttcccccatgacaccatcggatgcaaccttgtccctgccgcctccagctctccttgatttcccctctgagctcacaaaaagaaacaaaagctcagagaggctgaataactttcccagcttacacggaggagctgggtttgaatccagacatcacactgatcagcacgcagacccgcagggtttcatactcttccggcatttcacgtacacctctctccatctcaccgcctcaccataggaggtgaggcctattcctatccgcacaatctgacagggaaattgagactcagagaggttaagtaacttgcctaaggccacatagctcgtaatcagggcagcagggattccaggccgagcaggcaggcccctgatccaggctcctagcctgctgcccagggaggtcagagctggaaaccacttccacagcacaaggagactctgcttggactgtgcttggcctcacgtgacctctgacctccctggccctcctgtgaccctgacaggtgtgctgagcttctgaagggtgggaaggcctgcaaggggcctgcgtgcattctgtgtgcatcgacccaggacaccacggttggtgcctctgagttcatcacgtcgatcatccccgtcttctttctgctcaagtacttgatttgtcaacatgcacagaagggtgagacctggccatggtgctgcttgaatcttgttaacagttaggctctgattcaatagtctgggtggggcccaagactctgcatttctttttcttttcttttttcttttttgagacggagtcttgctctgttgcccaggctggagtgcagtggtgcaatctcagctcactgcaacctccccctcctgggttcatgcaattctcttgcctcagcctcccaagtagctgggactataggcacgcgccaccatgcctggctaatttttgtatttttagtagagatagggtttcaccatgccggccaggctggtctcaaactcctgacctcaagtgatctgcccgccttggcctcccaaagtgctgggattccaggcatgagcccccgcacccgccagactctgcatctctaaagtgctgggattccgggtgtgagcccccacgcccgccagactctgcatctctaaagcgctcccagggatgctgatgctgccatctgggggaccacgcttggagtactgcggccctggcaaaccatctcttccaggaagctgcatcttgctctgccttcctcccctgccagcagctcagccctgatcatctctcacctgaggcccttaaaagcctcccaatcagcctctctgcccccgacccccaggcctgcacccggtcctctcccgcactgcagcccagcgctgtctaactgagcgacctgggttacatttcagcatcccccatgtgattccctgctgtccacaccagcaagtctctgagtgcaacccgcagccacgtgcatcataatcagctgagctgctggtgaaggggtagattcctgggcctcacccctgacagatcctatcccagcccctgcgggaggggcccaggaatgcagccagttcaccagctgccctgccaaagcctggcaatctctgggcctagaggcttgagaacggtcaagcagctcgccctggctcccctgggagccaccctagcctggaacgctgcacaccagacaggggtggtagagctcctggccattcccaaatgccccacacccagcagcgcctggaatgtgctcatgcaggttcctcgtgacatggacacacccccttccccatcctacccacatgtccccagcccaggcctcgttcccactcccccaggatgccccaaccctccaagggaacaaagagaatgctcttccctttctccagaagcccagcacccgggccacatagtcaagcgctttgtctttgaaacataaaaatagctatagaagggctccgttagctggcatcggccagagagagaacatttccatataattagagcttaccctttcatatggaaagttagacatttctctgtctaaggcgcctacgtagaatatgtaatttgaccttctttgggggaaattttggattgtctttgggatgataatataggaaatccctcgagggcttttaaaatgtaaagaacagaggtcccataaactaagtgaccccagaatgc

SEQ ID NO: 2188 - DNA, 1793 bp, Homo sapiens
tctcaagagactctgccccaagtgcttaaagatacatactgcacagctctgtatccataacatccgaaggcagatgaaggctagggggcatgggaggctgggcatggagggtgaaagtgtcaagagagagaagacctggcgccttaccaggatggagccctcctggccatggtgccggtggaactgcaccatggcttggaaggggaaatcgcagatcacgtcactgttgaggacgaagaaagggtctgcagtctcagagagtaggtcacgggccagcgccaggggcccagctgggggaaggggacaggtcaccaccttgctggaggtctgagtccctggattcaggctcagcaggcccactccaggctgggtcttacccttttcctggccttagaccctcccccaagggacctttctgcctctactgacctgtccccaaaggctcctcttcatgggacatggagattcggattcccagctggaaggaagaggcccccccagtcaggttctaccaggatgggaagttgggcggggaccgagaataagggccaagagtctgtgcctcaccctctgctcctgtgccttcatttccttctccagcacctgcgacatgtagctcacggccaggatcacgtggtccacgcctgcctgtcagaacgcagggcgacgggcgggctcagtcagaaggtacgggagcccctgacccctagtcgctggccatccctagtcccgccagatccgaacgcgactctgatcccgacccagggtcttaccgcggctagcgcctccacttggtgcagcaagatgggcttattgcagaagtccaccagtggcttcggggtgctcagcgtcagcggccgtagccgcgtcccatagccccccactaagatcagtgccttcatcgcgcctgcggacgttgagggggtgtcccgggctctgaggtgcctgcagcccgcctggccggtccctgccgcgcactcccaacgccgtgcccggccccgcgcccttcaccaacccgcctgacagactctggctccacctcgtccgcccggtcgccctgacgccggatccagggccgccacaacacagaacgcgacaccgggtagacggctgctggccccgaactcaggccggacccggcgcgggcagtgacgcgaccaccgcgggccaatcggctgccgcgtacgtggcacggccgccggcgtcggaacgttggagcgcagcgctgcgacagacgtagccaatgagcgcccgagtacgccgggctgccatggagacccgggccgggacccgcgggtcagctggccattggcggatccaaaggcggaactggcgccaagggcgaggccttgttccctgcttcgccgcggtccagcagccgccggccccgccccacggccccggcctcgccccgagggtgaccagggaaggctcccgggccacgggattttcacaaagacagactcgcctccgtttctagcggctttatttttgacatacacgacctcagacacaagcggggcgggcagcgctaggtgtacagaaaggagcgggctcggaccgagcaccccctcccccgcacgcaaggtccaaagcaaacgcaactgcggcgggagccaccggcgcaggcctcgggcggtggagacaggcttagcttccaggaaagagcagcagagagcgattcccagaacgcgagggcttacagttccccgagaagcaaaagaaccaggtccttcccagggttctccattattttttcctcattaaaatatattttaagtcagcacaaacat

SEQ ID NO: 2189 - DNA, 2427 bp, Homo sapiens
acctctcttagcctcaatttgctcctctgagaagaaaggtggtaagaggatgaatctcgcagggttcttgcagggactaaatggggtgagccatggcaggtgctgacctggtgcttggctctgtggaaatggctgccagatgtgctgtggctgttatttattttttgaacacgaagtagctctctgcctcactcatggccttcctatgtttgggaaagcatatggaaagcaaacctgttttcccatttgtgaagagggtttgagtttccacatggctgatccctgtgcttggggtacccagaacagggctccctgggggctggtggaggggccctacgctaactcagatatctgggaaaattctggttggggttcattctttcaacaaatatacattgagcacctactttgtgcaggtactttctgcctgcagaaggcactccctggggattgtctgaattctggctggggagtcatgggtgcactagacatcataagcaggctgcgtccacagtatgttgacattgtgatgtcctcctggcctcttccagatacacatgcatcctgccatattctgacagagatgatggacctcaggatcaactaaaaatgtcagtggacttcaggtctagaaggacgggctcctgtttccccagaacagttgggggcatatgggagtctgtggctggggaggggctggcagaaccctggatctcatacatcttaggattcccatgagagggctgaggtctgggggcttcctctgcaggaggaaattagttagtgagagttatggataggatccaagtcccctgggaagtgaaagggaggctggggctcagagccatccccaccacagtcccatcccagctctgcccgcctccttccacatccacccctccagacccaacctctaggggacctagaacaggagctgtagtgagcaacctgctcacacttctacctcaaacctcattcctggtgcaggtagcccttcagagcaagagtcactggcaagacccagcccatgtaggttctatgcctgccctgcctgaagaccagggctgtctctgccaggacagtcacagaggggttgggtggggccgtctctggacaggcagggcaggcacaggggcccacatccaaacaaggtgccctagaagagcaatgtggaaggaaaggccaggtatgtgactctgctgccccccacccccaccccctaacactatctcttctatcctgggcacctggccagaaaagtaccctgagggcactctggggaaggagcctgctccagtgacagcccaagatagaatcagtcccagagcactcctgcccctagcctgggaccatacagaactggcccagtgaggaggtccccagcctcctgggggattctttcctatgctggtggcagagcaattgactctgatggatgcaatgagcgctgggctctcagggcagggtggggacagcctcccctctgggacctttccctgagcctcagtcgaatgatgggggcccaatcccatctccacctcttaccaaccatatggcctggactagattcttaacctccagaccttcactgtccacatgtgcagggcagagatgggacataacagcacctgccacacacagtgactgtgcagaatgagaggagagagggaaggcaggtcagggcctggtccctttgtaggtggagggtgctcactgaggagcagccaggtgcatgggttgcccacttgtgctcaggaaacctcacccacctcagcccttattaggcacctaatgtggattctaagacagacactgaaacaaagctgcccctggggaagacgacatgtatccaaatggggagacagactagatggctgatcaagaaggagacagatgccatctggggagggacaggcataagccactttctggtgcttggagttagtgaggaagggctgagtgaagatgccactctcctgtgcctgccagtattgggtcctgggtcatcacatgctgggtgccctcagtgaaccaccatgtgatgcagagacaagagagtgaaggcctgggccggcgcagggtggtgcaactttgaatcgaggtggccaaggtttgctgtgggaggcccagggagctcccgtctgtgtccccttccaaatctcatcttgaattcccacgtgttgtgggagggacccagtgggaggtaactgaatcatgggggcaggtctttctgtgctgttctcgtgacagtaactctcacgagatctgatggttattataagggggagcttttcctgcacaagctctttttgcctgctgccatccatgtaagatgtgacttgcttctcgtcttccaccatgattgtgaggcttccccagccaccaaccatgtggaactgtaagtttaattaaacctctttcttttgt

SEQ ID NO: 2190 - DNA, 1741 bp, Homo sapiens
atgtgcctgttgtgggagcagggccagcagatcaccatgatgagggtgagcagagatcacactaccgattctggaggggaaccacagacaacctgggtgaggggaagaatatggcaaatagaaactcttttactttgctgttccggggggtccttcattcttgtttctcctaaaagaaaagcttgagggctccattccttttcagcagctgccttagagtccccctgcaacctcagtggggcaccagttgccctcacctttacagtctggtaaaaaatggtggatatattgtttcggcatctgttaacaggcttatcctcgagggaagaagtgaggaaaagggaggaacaatggtgaaccatactaatatccacataagaggagtcacagtgaaaaaatatgtttgcatcttggttttggatgctctttcaagtggacccccacatagatgctccaaacagaagtgaggactagaccagagttagaatagtacagaagagttcaggttgagttaagagtcattgaggccagggatcttctcactgggtgctgctatattcagcctgacatgactattctgcaggcacacgtatagaaggagttggtgatggggttttacaccgttgggtttcttctttccatcacagggatcacaagaatcatcactgcggaagacagactctcgagggtaccttgtgcgcagtcaatggtctagaatatcccggagcccatccaccaaggctccatccatagatgagcctagaagcaggaacaccagtgctaaggtagagctccccagcagctccacgagctcccggactccatccacctccccaagcctgcatgactcctcgctccagccacccgcgtcgccccagctgccccggtcgctggactcgcggcctcccacgcccccagagcccgatcctggctcccggcgcagcaccaaaatgcaagagaatccggaggcctgggcccaaggcatcgtgcgggaaatccgccagacccgggactcgcagccgctggaatattcgcgcacgtcccccaccgagtggaagtcctccagccagcgcagggggatctaccccgcctccacccagctggaccgcaactctctgtccgagcagcagcagcagcagcgggaggacgaggacgactacgaggctgcctactgggcatccatgaggtcgttctacgagaagaacccgagctgctcgcgcccctggccgcccaaacccaagaacgccatcaccattgctctctcatcctgcgcgctcttcaacatggtggacggcaggaaaatctacgagcaagagggtctggaaaagtacatggagtatcagctcaccaatgagaacgtcatcctgaccccgggcccggcgttccgcttcgtcaaggtattctgcaagctgtctttggcccgccaggacactcgatggcgagggagggacccaggccaacccttgggagggcatccaatttcccagatcattcctagcccacccttgtcattcttgtctccttctagctgacccaggtcagtttatgatttcgcacaggcttccagactgtggaggaagggactccagcccacagccctagatttggtatgttagtcttccctaagtgaagtcctaatcatgagacttgtaacagaaacctctctccctcgaaggagtgctaagaagccataatgagtttatgatcctgagtagtagaaataaaacgccatattacagtg

SEQ ID NO: 2191 - DNA, 2154 bp, Homo sapiens
actatctcccgggtgaacggagctttcgcagctggagaaggctcatccacctgcagacatggggcgcagaaagtcaaaacgaaagccgcctcccaagaagaagatgacaggcaccctcgagacccagttcacctgccccttctgcaaccacgagaaatcctgtgatgtgaaaatggaccgtgcccgcaacaccggagtcatctcttgtaccgtgtgcctagaggaattccagacgcccataacgtccagcgcacatcccttgctgtccgtgatgtcttgggttctgcgtctgcctggtcaccagaagaaggagaggggacctgaggctctgacgttcgggaggtggcctggtggcccatgtgaccagcccttcaaaccacccagcgttttattcagtcagtaagcattcagggtggtggagcaggcagacatctggccaggtgtttacagcagtcacaataggaaatgggggaggtgagacagaacaggtggtcagaggaggcttctgggaggggcaggctgagacagtgacaccgtagggccacctctagccagacgctgacctctggccttcctgcgtcgccccagtgtcctgacagccactttgtggggcaggtgccaagctaaccccaagttcaaagatgaggaaacagaggctagaggtgaaggaggtcactggcccaagaccctacagccagaaagtggcacaggggggatttgaacccaggaaacgaggctccacagcttacagtctgacttcttgtgagcccagagtccaggctgagggaacagcttacaggccgttctggaggtagtgagtggaagagggacacgggagggaaacatgaaaggggcctttattcaagggtggtgaggactctcagaaggctggtgttggggcgggatgtgtgtggccgatggggagcacctgagggctgatgtccccttagctggtcgcaccggtgacaaggaccacaacacccagcaacctggggcagtgccagaccctccacctggcctcatgagcccgggtggcaggtgacctgtgcttcagagtcctcgttgctacagtgcaggggatgaaagcaccttcttcccggagccatgctgaggatggaagtgccaggcatggtttgagcggctctggggcccacccagggcactgacggatgtgaacagcggggggagacattgagctggcccggaagccctggctgccagactgggctgctgggtctggcctgtgcacccccccaggcccactctgccatgacatgtcttccctggttatcccgccacctccaagatcccaggtaaggtctgctagccctggcaggagccggcacacatgcgcagagtggtggacaggcacctaggtttagggtgatggccctctgggatccagcaaaaagggggctcattcctctggcacccgaggcccttcctgccgcccgcccaccccagcctcacaggctaagtgctaatatggtgctgttttcccgaggaggcagggccctgggccaggcccggatcctcctcagcatagcttccccgcgccggcccagggggagcacgacttgcggtagccaggccaaaagcgcctggaatccggtttacgaggccccaggggctgcgtgcgtctgtgcgcgggtcttctggtgtctgcctccgcaggtctccacgttccagcctcaactcctgccctccctggggagaagacagctccgtgccgcgctcctcgcttctctgcctcctctcctccttggaatcctgatggttggggacctctccctcctcccggggataacagggtcccctctgaaatgtgaggaggttgaggccctggacacagccttttagagtcccgggttggcaggctcagccttaagacggctgagagcgggcggggcgcacagaattaaccgtgccctatggtgccctgtgccagtcagtaaagggccattgccttggctcagaagtgcccctctccctgtcccctttcccctccccacagtctggggctaaagggttcaccctgcccacagggcccaccaggacccctacttgtcatcctttctctattgatgcctggtctttaccagcgattaaacatgtagaacatcaccccatctgggggtgtcgtttcatgaccac

SEQ ID NO: 2192 - DNA, 1845 bp, Homo sapiens
ctgtaggcaaatctcatagaaccaggacctagacaaggggttactaggggccaggggaggggaaaccgagtgacagccaatgggcactgggtttcttctttttacttttttagagacagggtctcactctgttgcccaagctggagtgcagtggtgtgatcaggcttaatgcagccctgtactcctggcctcaagccatcctcccacctcagcctccagagtagctgggagcacaagtgtgcaccatcacacccagctaacgtttatttttttgtagagagagtctcactcactatgttgcccaggctggtcttaaaactcctggcctcaactgatcctcctcctttggcctcccaaagtgctgggaccataggcatgagctgccattgccagctaattgttttatttttacatttgctgaggcagggtctcgcttgtggccgtgcagatcttgaactcctggccttgagcagtacctccctcctgggtctcttacagtgctgggatgataggggtgagccgctgtgcccggcccggggtttctttttgaagtggtgagaaggcagatgctcaactgtgaatccactagaaacccctgagttgtactttttacgtgggggagtggtctgacgcacgaattctctctgagaaaggccattaaacaagaatgcagcaaacagtggctgtccggtcctccctgcaccaggccctgctctgctgccagcctgcctggaacaggaccaactccgctgcccacttctgcgcccagcactcactcgcagctgccaagatcactggcctcgtgatcagctagtgggtgggctcgcctcatgtccccatgggctccgagccctgggagggcctccagcaccacgggttctcgtggcagcagtgcctctgtcttagggagagggcatatccctggcccttgtcccggcccccgccctgggcccaggcaccttctctgtctctcggctgcatttgatgatgaagatgttggcatagatgtcctccacacacatccagctggacagggacagcgtggtgtccgtccacacccagtccatcactgcccgcagctccaccaggaacggcaccagccggaacctgcccacagccagggttcccgtcaggtgggctccctcatgcccgggccgtgacccccaccccggcggacctgcactcacccctggaagaggaagaggttgagatgattgtacttcttggtgaggaagttgccgaggatgcgggtggggtagccgcagcggatctggtaggcggacagggcgaagtagatgcacttcacgaagtaccagagctgggccaccacattctggttgaacatcctggggcgggatggccaggtcaaggaccccatcagaaacagccccgcagggcccccagcctgcactgccccgcccctggagaccgagcgcccccacgcgtgggcccacctctcagtgacggcgggcaggatgaagaacatccataggtggatggccagcaccagcgccacctggaaggccagcttgcccagcacggtcttgcgcaggtagagggcgcggtcaaccaccatggtactgaactggatcagcagcatgaccaggaaagcctcgggtacctggtcgtctgatagggaggacgtgatgtctgtggccgccgagtgcttctgtggccaggagagcacaggtcagggggagccaagcccaggggatgtgggtggctgctgagctctgcgtacactgggtttgggtcccgggcctggctcaccccaaaggcccagaagccaaaaatgatgatgatgaagtcgacaacatcagccaggaacatgagggcatagacgtc

SEQ ID NO: 2193 - DNA, 1567 bp, Homo sapiens
agttgcacagctgcctggcatgtgactggaggtactttgcagtcattgctgggatttcactgatgtgaccccaacgctgcctccctctccaccccacgatgtcggaagaaactcaacagagtaaattggctgtggccaagaaaaagtctcaacgggaagccaggccaatgagaacagccacttgtcatcaggctgtccctttaggagtcagtgaaagggccccaggatgtggtgaggagggccccaggcactagaattaagagaagatctaacttgccaccagattgctcggtgaccacagaaaaatcacttcttcccctgggcctcagttttctcctcttcctcgagccgctgtgaagcagtcctcaagcggcagttatggcagtccataaaggctcgggcacagctggaagcacacgtgacacagatgttggaacaagtccagctagagacagatgaatatactcaacatctaaaaggagagagggcccggtggcagcagagggtatggaaaatgtcagaggaggtttgcacatggaaggaggagaagaagcatgacaggcatcgggtacaggacctggagagcaggtggcgtttttcaactccgctggagccagtgcccaggaggagcaggtatggcttatgtgggcagctgagggagcaaagggtgtggtgccagcgcctgactcacccgggtggccttggcccagaaggagccagaggtagtggaaccagccccagggactggggatgagtctgtgtgtgggtagactcatcaggccctgcagggatccatggagaagttgcagagtggctttatggacctcctgaaggagaaggtggacctgaaggagtgggtggagaaactagagcttcgatccatccacctctcaggacaggcagacaccatcagaaagtaaatcacaacatacgagggccagagggcagcgccaaagacgcggcaccaggaggaggaggacatcatcaggctggcccaggacaaagaggagatgaagatggggcattgcagcacctctgtgggggtgggggtggggtgggtgtgagcgtgggcaggggcactggcaccagcgtggcagctaagcacccctcccttcaggtgaaactgctggagctgcaggagctggtgttgcggcttgcaggcgatcacaacgaggggcatggcaaattcctggccgctgcccagaaccctgctgatgatcctgctccaggggccccagcccctcaggagcttggggctgctgacaagcagggtgatttttgtgaggtgagccgacagcctggagcctgcaccaggagaggccagggagggttgtccccatgacaaccccactgcacagcagctcatgcagcttcttcctgtgatgcgggacccccaggagtacccaggcttgggcagcagtccctgcatgccattcttttaccaggctgccaagaacagggagctaaacatcaccatcatctaagagctggtcaagaaattaacaaagaagaaaaaaaagttatggggttaatctcctacacaattcatttacttcatttgaatgtt

SEQ ID NO: 2194 - DNA, 1520 bp, Homo sapiens
atataagagggggcgggagacaagccctatcagcacatcccagaaaatgggaaaccgaatcacccaggggatggcaaggaatgaccagagggaaagttccagttctgtccaacatgcactaccagccccattttggaaaagaacagatttaatagacctcaccaagacaagaattgtttttcgtcaaaggaaatcaaaggaacaaacaagaggcagtgaccaccagagacttcaccttttggtgtaggaaaacccaagcagacagtgtctacatccatcaaagcccaatgtattaaatatttattgaataagaacccacggactcttccttaccagagccttagattgccatgtgcgtctgattgctccaaagacaagactattgtgattttggccccatatgcattttagagtaacaagtcttaccagaaaaataatagccagccccagcttaattcctagagaaactcaaaccaccttgttaagaacaatcccagaggagagtttatactaaggagcactacacaatgctgtttgccatctctgggccctctaaaagcaagcccaaccttggaaaaggaatgtctgccaccagggaaacgtggctgcactgctggaggaagaacttgatcatgacgggcaatgcttggaagtaaagaagcatctgctgccttggaaaggcttggtcagggcaatcattgtcacaggccatgttttttctctgactatctcttggaatttcagagtgactaagtgattactacaattgtgagtgccgtggaatagaccctgttccataaaaggtctcccttggtcctacaggaggctctgggagcccgtgctttagcgaatgtatagtccctcattctttctctgggcagctggttttcctgaaggttctgctcccagcaagcacagtccacagcagtagctaaatgtgtgcagtgcatgtgtacttttatggtcttcatcattatttatgaactaacttcaaagagagcaagaggcggtgtcttccagaagtcggtgtgggcagcaccaaaccatccaccatgcatcagagaaaagccagacagctggaaggctctattcccaggccactctccagtcctcaaacatgtcaccatctctcatgcctccttactgggcccatgctgtctccttgaccaggaatgtcctccaccccgatcccatccccatagcccccttcactgtaagatctgggcccagcaaattgcccagctcctcttctctgaatgcttctttaatgtctctgagaaggagttccttcctcctttactgtccatctcttccaccacatgaggggtttgggggaggtctttgaagacaagggacccttcctcattcatatttgaatactgagcccaagcacacgcccctagcatctgcaatacacacatgtcaaggtgaatggggagatagatgccaagatccttgagcgctgcaaatcttcactgccaacttcaactactccaaaataaagtcaaaattttaaaagt

SEQ ID NO: 2195 - DNA, 2097 bp, Homo sapiens
ttcctgtgcacgttaccccactgcttgcggtgacctggagagagaaagaaagatgaccccttcctgaggcccgttagtgcagacacacctcagagtcctgagcaggtcaaggcctgcccccaggaggtgaacctgttgtccctacctggtgacggatggctacggccttagcgtgcatacggccaggtgttcactccctgctgaactcactcagtccccttcccacttcctcgctgcagttattccccgtcgtacacaagagaacactgtggcttcgagagggccagggccttggccaagcccacaaaggtcgaacatggtggaactgcaatttaagctcagggagtctgggcctcagggacgtgagtttaaccacaggagcctacagggtatgtgtggattggagtggatgttggtgtggagacaagaagaggaggtgggaccccccaccgccccccggggccatcctcctgagagctggggctgcccccagggtttgctctgcagacacacctgggaggcatcagcacgttatgctttctcgccaaagaacttaaaatggagacctggcttccgctgagtttcctctctgccccatttcccggggtagcccaggacatcacctccctctctggcctcagcagcagtgagggtcacacagcatggtctctctggcagcgtccccaggccagcgtcaagaagtggcagtgcctccaagacaaagcccacaaaggactgtgcccaggactctgccccatcagcacggctcccttaccagccctcagccagcctgtgctgcggactccggcgcccaagaaaagccgaaggctcccttgggcctgccagggctcacctccagttctgggccgccggattcctgccccgcctttgctcagcgcctgacccctgacccttacagaccaccatccgcagtttcccttccaccttacaatgatggggcgccctgggccagggctaccgcacctcaccccgccccatccagactcccagaaggcatggccccaggacccactgggccaggagaagtagctgggtacacagcatttaggagcaagatccaagtttgctctgatccaaaaagtccaaaaagtaacttccaggttacttgtcaatctactcctctggtgtgggatttgctttctgccagcatctttccattcccagaacctgggagaaaacactgacctctttaggaagttgggctctcccctcaccactgccacccaactttacaaccttggccaacgtctctggttgctgctgctgagagaggtcaaggccaaggtcatactctagttggtacataagccaagatccacttgaggcccgacttcagagtggacatttcccaccttgagtgtgcgctgacctttctagaatgcaaggcggtgcaggtagggcctgtgcctgttgctcttccactccctcacatgccccttgcctagccggccaaggaggctgtgcagcccgaggctctcaaaggcctctaccaaggccttctcttccttcccacccaagcttccggcagcctggctccagtctgacccaaacccagatcactggccaagcaggcagaaggtgctgatcaaaagggccctcaaagctcattttatctaattgtgagtcttcacagagaaagggctgaaaagggagctgacgtgaacagtaaatcatgtctgcagaaagaggagaagcttcccttggaaattaaggaacgactgtcgacaggccggaccatcagaacgccagctgcctaatgaagcaataaaggcctttgtccccccacttctcgctgctctgctcttacatgtacaattattacaaaaatcaaagagaggaatgttgccttgagatatgatttccatattggtatggattgtattatacaagcagtacaatacgctccattatcattttgattatatgcgcctttcgtttgcactattggaccattatctgccgtacattcattacattataagaaactggaactctgtccttgcaatgaattgtaaaaaaggatttctattttttgcagattgatatttcaggggagaacattaaacagcaaacatt

SEQ ID NO: 2196 - DNA, 2175 bp, Homo sapiens
agaatgcttactacagagacaccagccccaagctaggagatcctgccatgggcttcaggctcctctgctgtgtggccttttgtctcctgggagcaggcccagtggattctggagtcacacaaaccccaaagcacctgatcacagcaactggacagcgagtgacgctgagatgctcccctaggtctggagacctctctgtgtactggtaccaacagagcctggaccagggcctccagttcctcattcagtattataatggagaagagagagcaaaaggaaacattcttgaacgattctccgcacaacagttccctgacttgcactctgaactaaacctgagctctctggagctgggggactcagctttgtatttctgtgccagcagcgtaggcgggccgtcaatggaccaattgaacccctctggggccaacgtcctgactttcggggccggcagcaggctgaccgtgctggaggacctgaaaaacgtgttcccacccgaggtcgctgtgtttgagccatcagaagcagagatctcccacacccaaaaggccacactggtatgcctggccacaggcttctaccccgaccacgtggagctgagctggtgggtgaatgggaaggaggtgcacagtggggtcagcacagacccgcagcccctcaaggagcagcccgccctcaatgactccagatactgcctgagcagccgcctgagggtctcggccaccttctggcagaacccccgcaaccacttccgctgtcaagtccagttctacgggctctcggagaatgacgagtggacccaggatagggccaaacctgtcacccagatcgtcagcgccgaggcctggggtagagcaggtgagtggggcctggggagatgcctggaggagattaggtgagaccagctaccagggaaaatggaaagatccaggtagcggacaagactagatccagaagaaagccagagtggacaaggtgggatgatcaaggttcacagggtcagcaaagcacggtgtgcacttcccccaccaagaagcatagaggctgaatggagcacctcaagctcattcttccttcagatcctgacaccttagagctaagctttcaagtctccctgaggaccagccatacagctcagcatctgagtggtgtgcatcccattctcttctggggtcctggtttcctaagatcatagtgaccacttcgctggcactggagcagcatgagggagacagaaccagggctatcaaaggaggctgactttgtactatctgatatgcatgtgtttgtggcctgtgagtctgtgatgtaaggctcaatgtccttacaaagcagcattctctcatccatttttcttcccctgttttctttcagactgtggcttcacctccggtaagtgagtctctcctttttctctctatctttcgccgtctctgctctcgaaccagggcatggagaatccacggacacaggggcgtgagggaggccagagccacctgtgcacaggtgcctacatgctctgttcttgtcaacagagtcttaccagcaaggggtcctgtctgccaccatcctctatgagatcttgctagggaaggccaccttgtatgccgtgctggtcagtgccctcgtgctgatggccatggtaaggaggagggtgggatagggcagatgatgggggcaggggatggaacatcacacatgggcataaaggaatctcagagccagagcacagcctaatatatcctatcacctcaatgaaaccataatgaagccagactggggagaaaatgcagggaatatcacagaatgcatcatgggaggatggagacaaccagcgagccctactcaaattaggcctcagagcccgcctcccctgccctactcctgctgtgccatagcccctgaaaccctgaaaatgttctctcttccacaggtcaagagaaaggattccagaggctagctccaaaaccatcccaggtcattcttcatcctcacccaggattctcctgtacctgctcccaatctgtgttcctaaaagtgattctcactctgcttctcatctcctacttacatgaatacttctctcttttttctgtttccctgaagattgagctcccaacccccaagtacgaaataggctaaaccaataaaaaatggtgtgttgggcctggttgc

SEQ ID NO: 2197 - DNA, 1633 bp, Homo sapiens
aaaaagctctcagagaggtgccttagccctggattccaaggcagttccacttggtgatcagcactgaacacagaggactcaccatggagttggggctgtgctgggttttccttgttgctattttaaaaggtgtccagtgtgaggtgcagctggtggagtccgggggaggcctggtacagcctggggggtccctgacactctcctgtgcagtctctggcttcaccttcagtaactatgaattaaactgggtccgccaggctccagggaagggactggagtggctttcgtacatcagtactagtggcgcttcccaactttacgcagaccctgtgaagggccggttcaccatctccagagacagcggcaaaaactcactgtttctgcatatgggcagcctgagagccgaggacacggctgtctattactgtgcgagagggtacagtacagcagcagctgccataaagtacaactggttcgactcctggggccagggaaccctggtcaccgtctcctcagcctccaccaagggcccatcggtcttccccctggcaccctcctccaagagcacctctgggggcacagcggccctgggctgcctggtcaaggactacttccccgaaccggtgacggtgtcgtggaactcaggcgccctgaccagcggcgtgcacaccttcccggctgtcctacagtcctcaggactctactccctcagcagcgtggtgaccgtgccctccagcagcttgggcacccagacctacatctgcaacgtgaatcacaagcccagcaacaccaaggtggacaagagagttgagcccaaatcttgtgacaaaactcacacatgcccaccgtgcccagcacctgaactcctggggggaccgtcagtcttcctcttccccccaaaacccaaggacaccctcatgatctcccggacccctgaggtcacatgcgtggtggtggacgtgagccacgaagaccctgaggtcaagttcaactggtacgtggacggcgtggaggtgcataatgccaagacaaagccgcgggaggagcagtacaacagcacgtaccgtgtggtcagcgtcctcaccgtcctgcaccaggactggctgaatggcaaggagtacaagtgcaaggtctccaacaaagccctcccagcccccatcgagaaaaccatctccaaagccaaagggcagccccgagaaccacaggtgtacaccctgcccccatcccgggaggagatgaccaagaaccaggtcagcctgacctgcctggtcaaaggcttctatcccagcgacatcgccgtggagtgggagagcaatgggcagccggagaacaactacaagaccacgcctcccgtgctggactccgacggctccttcttcctctatagcaagctcaccgtggacaagagcaggtggcagcaggggaacgtcttctcatgctccgtgatgcatgaggctctgcacaaccactacacgcagaagagcctctccctgtccccgggtaaatgagtgcgacggccggcaagcccccgctccccgggctctcgcggtcgcacgaggatgcttggcacgtaccccgtctacatacttcccaggcacccagcatggaaataaagcacccaccactgccctgg

SEQ ID NO: 2198 - DNA, 2159 bp, Homo sapiens
agttacccctttgcaacagaacgaggccggcattttctaaagcgtccttgaggagtccagttcctaaaagattatttcagagtccactgttgtgggctgacttgaatgctctcaaaattcgtaagttgaagccctgacccccaggacctcagaacgtgactgtgcttggacacagggactttccagaggtgattaaggtgaagtgaggtcactggatggccctcctcctatctgactggtgtcctgatggggacgcggacacccacacaggaacggacccggggagaacaacacatcgtctctgcgccagggagagaggcgtccggggaacccagccgtgcccacgcatttatctccgccttccggctcagaattgtgaggaaacccgcttctgttgtgcaagtcccgggtctgtggtgctcggccatggcgcccccagaactgcatccccaccttctgctctgagccacccatcccctctggaagggctgagcttctctccctttccaccttctgttctgagccacccgtcccctccagaagggctgagcttctctctctttcactgcctatgctctgggaaactttcagaatccccaggctgtttctggaatagtctgggatggtcattttcggtcctcacagaaccgggggtttggaaagtaggtgaagccatatgggttgcagagaatctggcccagcccctcactagtccctgtgcttgttagttattctttaattacttggatatcaactctgatttaaaacatcaatttaacatacagataatgctgggactgcagcttcgccaggtggccttcctctcccggtctcgggaggcgtcacccccatcttgtccccccaagatcaagcgaaaagggcaaagttatctttttttttgcaaaattcaaacctttccctccttcccaggtctgggtcgcttgcgaccctcctctcaggctgcttctgacaggcccaagtcacagccaacttcaggggagctgtgttggatccctccaaactccgggaatgatgtgacctccccggcgctcaccctgggcctctaggttagactcagcccagaccctggctcacagggaagcagagcccatggctggcctccacccgctcagacgcccgcacacaggccaggggagggcttgggggcagctctgggagggtccctgtttgcgctgtgggtgtccaaggctgggtgtgcagagctgaggttgccacacacctgagggactctcgcataaggatggcgcggggctggaagctggactgagacagtgaatgagacagcgctgccggctctctccgcgccgtggactggctcctaggcagtctcacgagcaagtgtggtgttgctcgtgcacgtgtgttttaactgagatgtgagctggcgcgttttctccacccggctccatctgctgggtccctccacattgctgcgcgtgtgcctccagtgccatggggtccccactgtgggcagccccgcattttgcccaactgcctcccaaaccatggaaccccagtgacctccaacttgccgccatgacgagccactctcattcatatcctcaaacacggtgctctgagcccgaatgagggtttctttagagagatatctggggaccaaactgtagggacagagctcccgtctaaggtgggcctgtggtgaggtctccccagtggtacactttaatcccacagcagggcttgcaggccgccctgctccatccccaccaacactgggcaggatctagcctccaaacctttgccagtctaatagtataaaatgatagctcggtgctattttggttttgcatttccatggtgaacaatgagtttgagagtttttgttcaaaagtcctttgggagttcgagaccagactgggccaccaggagttcaagaccagcccgggcaattcagtgagatgttcatctctacaaaaaataagaaagataaaaaattagccaggcatgtttgtgtgtgcctgtggtcccagctcctcaggaggctgaggtgggaggatggcttgaccccgggaggtggaggctgcagtgagttgtgatcgtgtcagtgcacggctagcctgggcaacagagtgagaccccgtttctaaaataaaaataaaaaacaaaagagaaaagtc

SEQ ID NO: 2199 - DNA, 2658 bp, Homo sapiens
ggaaggaggatctcacctccagtgttgtgggcccagcagggtggatgagccatgcgggatgcccttggcattgcaaggaggccagaggccggtcccctcacccccagcagcctcccctttccctcccctcctcacctgaccccacatcaagctgggcagcagacggcctgctccctgggggcaccactgctccacaccgggcaggcccaccagcatgccacacggcccgggccatctcccgctggatgcctcatggggcaaggcttgcagttgcaggtccccaggggtggcccgcggtcaggttgctgcgtgaggctcccttgaggggattgggagatcctggtgctcggctctcagccctggaggggcccagggccaccaggcaccaccgtccccatcactcgttcggctccagtccagtcggaaccagtcccagccccacagtgaccttggtggcactgaccctgtctcattcggctccagtcggaaccagtcccagccccacagtgaccttggtggcactgaccctgtctcattcagctccagttggaaccaggcccagccccacggtgaccttggtgacactggccctgcttcttcaggtctcatgttccacaggctcctgagaggcagaggggctggggctggggggccgctggcggactccatcaggcatggccagcagccggccaggactcttgcagaactgagacctgggagctcctccctcaccaggaagggacccgaggcaggcggcgggggtctctgagcctgtaggtgacatgcctggagctcacaacccacatgtgggcctggggctgcagacccccacctgccagggcaggaacccctgcgggccactttgagggacagacttgggtcacgtctggtttgtgcaatcctggccaagtcacttcacctttgaggacaggtgaaggaaggcaggtcccccaggaaaggcaggatggcaggagggggcacggggagtgagagtgcaggtcaggatggcaggagggggcacagggagtgagggtgcggatcaggatggcaggagcaaccacagggagtgagggtgcaggtcaggatggcaggaggggtacagggagtgaggatgccagaccaggccagggactgcactgaacgctagtgtctgtcccagggtcagcagctgtgggcctggcccactatggcccacagtccccatgctcaggaggtgggcacagctgccgtgggaaccaggaccttgcgttgctcatcctggcaccggcctcacctgctgagctctggtctctggtcttgtccttgacgaccacaaatcactttcacagtatggggagtgaactccagcagggaccctgagcctggttctgaactctgctgtaggagaggggggtccctcgcactgtgtcctaccccccagtattagcactctgtcctggctgcccggtaccctggccctgccttcttctctgtcagcaggggtggtggcaatggcccttaggtttcatttggaaccacagggcctggcctggaatccagcaggggctgggccaggttctcactgacccctggccatggtgatggatggtgagccggggccctgggaacctccgtctctctaagtgctgtgttgtggggtgacctcggacctgtgggcacacggctcagtgagatggggctggactgacgctcaggtgtgctgcttcttccctagagtgtgtggcaggccccaacatcgccgccatcgtcgggggcaccgtggcaggcatcgtgctgatcggcattctcctgctggtcatctggaaggctctgatccacctgagcgacctccgggagtacaggcgctttgagaaggagaagctcaagtcccagtggaacaatgtaagtggccgtccttgggggtcccacgcagaggggcacgtgcgtcccacactatgcgacctcctgctgcgggaggccgtggacacccgtgtgtggctgcaccccggcctccccaggcagcttgtcctctgggcgtccgccgctgtgggtgagcttggctgccggtgctgggaccctgggggggctgccccacgtctagctcttcctcaaagtgacggcttccatgcggggagtgtcctcagggagaaagattctgctctgaaaacctcccacactcacaagcccctgtttgcatttcccaccaggatccccttttcaagagcgccaccacgacggtcatgaaccccaagtttgctgagagttaggagcacttggtgaagacaaggccgtcaggacccaccatgtctgccccatcacgcggccgagacatggcttgccacagctcttgaggatgtcaccaattaaccagaaatccagttattttccgccctcaaaatgacagccatggcaggccgggtgcttctgggggctcgtcggggggacagctccactctgactggcacagtctttgcatggagacttgaggagggagggcttgaggttggtgaggttaggtgcgtgtttcctgtgcaagtcaggacatcagtctgattaaaggtggtgccaatttatttacatttaaacttgtcagggcataaaatgacatcccattaattatattgttaatcaatcacgtgtatagaaaaaaaataaaacttcaatacaggctgtccatgg

SEQ ID NO: 2200 - DNA, 1772 bp, Homo sapiens
acagattgctcttcagtggcagtgagaggagacctaatgcagaggctgcacagtggtgctgggattctataaccaacaacaaaagcaacaccctcattaccgacactcctgcagctcaaactactttgcctttgtgcgttggaaacccaacccaagcccattttccccactggaattatttgtgatgatgtgaagtttttggagatgcaaccatcccagaacaggcacgctcagatgagaagacgtgggagacacagttctagcaaacagttctaccgctcagagcaaagcctacgtcacacagcctctagggtctgggcacagtgtggggacaggagggctggccgccctgcctcttgaaaggaatacgcagctctgcaggttcaagccacccagctgaagtcctcaaactgggtaacacgggccaagatgccacctgcacgtgtcctgctacatcaccatggatctggccaaggagccaccaccccctcggagcacgcatgctggggttgtcaaggagaccagtgcacaggacggccgcacccagggctggagaccggcagcgcaggacagctgcatccagggctggaagacagactcgagttctgacccatctttcaatgggagagaaagaatccaatcccctgctagggccacaaggacatgatgggtttggatgccataagagatgagaacactccaagctgaagataaccagataagggcctctttgatttcccgtgtgtttacacaagctgtggccccaagtcttggaaagaatcaaccaccgccaggcaagtcaggacgcctccaggtggggtgaggggagacggccgccttacctgctcctgggaattcatcactcgaagcttcatctgcttcagattcaatggatgctacttgagtgccacccggataaacggcgcgcccttcattcgagtctgtttccatcctcgggcctgacttcagcaacttccacaggcccgatgcccgggagctggcatgatgcaccaggcagtcctggaaaccctgataaatcgcccacctgggcaccatttctcagggcagcattataattgtaccagccaaatgtgctgggccgtctcaatgtgccaaagccacctgcaaacagatgggcccccagatttcctggaggcctctgggatgttcagtttgagggggtgcgggggtgctgaagtgaggtccttgctggtctcactgggcaggacggagctggagggcatggacgtcagtccaagggatcacctttggtggtcacaagtgctctgggcattttattttattgttttttgagatggggtctaactctgtcacccaggctggagtgcagtggcatgatcatggctcactgcagcttccacctcccgggctcaagcaatcctcccacctcagcctcccaaactgctgagattacaggcatgagccactgtgcccagcctgccctggtcattttaaattctcatcagtcggccgggtgcagattacacacctgtaatcccagcactttgggaggccaaggcgggtagatcatgaggtcaggagatcgagaccatcctggctaacatggtgaaaccccatctctactaaaaatacaaaaaaaattagccaggcgtggcggtgggcacctgaagtcccagctacccgggaggctgaggcagaagaatggcatgaacccgggaaggcggagcttgcagtgagccgagatcgcaccactgcactccagcctgggcgacagagcgagactttgtctc

SEQ ID NO: 2201 - DNA, 2000 bp, Homo sapiens
atcttgtcgtatgatattaacacggctgctcggaaacacctcgagagagacaccagctttccccacgctcttcctttggtttctcttctggggggacattggatcgcacagctttgcaggggaaaaacagcttgtgtttttgaaagcaaggaataaaaacctcacaggcctccgtggctgactcgtaccttggaagattctgcaatgaggccacacggcacagaaatgttcttttacatccagacactaaacagtggcttgcatccttctctgtattagcaatgaacaaaaactaccaagacttaaaaaaaaaaatctctgattagaacccatggatgctgacaattatgtgtggctttcagatgcaaagccatttggctgcaggtgacatgaagaggctgggatacgattttgatcatttgctttcgccagcacttcctattagcacgagtgtggccagggagggtccttctctcatcacacttagagccactcgtgatgctgagtgtgctctttcatctggtgcagggcagggggcagggcgaggagagaagacccctgcttcacccactaaccaacaccctgggctggaagagctccaacaagcagcagacagagagttccatccccagcctgacagcatgaacagtgaagtccaagatagagccagctgtcgctgggagcccgggatggtgggtgcagcctcctccgcagctggtgagagtgtgtgtgtgcaggggtgtagggtggcctgttagcctagtgtctcctgcactcaaatgccctgtttcagttgagtaagctaattcacacagtgtcatgcaggctcctctggcttcggttcaagttaatgtcccattgaaaggcttctgttcaccttaggacacccagtcgggtagcccctgcagcgctctgccctgtgagcctgtgcaggtggtgcttggctgtgatcgaggttggcctgttccaggaagggaagcacggcctgggatatgggacggcactgtcctggcactgcctctaaccagcgtcagccttagcaggcacctgcctccttctgtgttgggtgtgtccagagccagagaggagcattccttttcatcacacctgaattatctccttcaacacccagagggaccaggctcccacccttggcatgatccaggaagaacagtgactcgagtgtggcttggcagcgccttacaggagaggcagggatgccgagaagggcaggtttgggcttcccccggaggcagagtggggtctggaaggcagggccccttggacagcatacacccttcaccctgccctggggaaggcagcaggacccagcggctcagtcttccgggtgggtcctaaccagccccacccccacagtgtgggtgctcccttgccttctctgggaccaggtcagcgtggctacagtaaagggccgcatcccttcacaggggacgctacccacagaggccagcattggtagggtgctgaggatgtgatgtgtgaggttgtaggggacatcagggccttctgtggcacaggcaggacttgacctcaggcggtgggctcctcggcctccctcacagtgccagagcccactctcctgtctccatgtcagtcccttccactaaactagcccaacacctggttcacggctacctgagcacactgggggctgggggcggggggcagggcggtgatgcacacttattaaaaccaagtatcagacatggtggctcacgcctgtcatcccagcgcgttgggaggccgaggccggcagatcaccttaaggtcaggagttcgagaccagcctgaccaacatggtgaagacctgcctctatgaaaaattcaagattatccaggtgtggtggtgtgcgcctgtaatcccagctactcagggggctgaggcaggagaatcacttgaacccaggatgcagaggttgcagtgaaccgagatcgcaccactgcactccagcttcggtgacagggcgagactccatctc

SEQ ID NO: 2202 - DNA, 2522 bp, Homo sapiens
tttgagacagagtcttgctctgtcgcccagtctggagtgcagtggcatgatgttggctcactgcagcctctgcctcgtgggttcaagcaattctcctccttcagcctccccagtagctgggattataaccttgcatcaccacccccagctaaatttttttttttttgtattttagtagagatggggtctcaccatgttggccaggctggtctcgaactcctcacctcaagtgatccacccaccttggcctcccagagtgctgggattacaggcgtgagccccagtgccttaccagaatggaaatatttaagtaaacaaaatatttctaaatgtaaactaatggcctacttatttagcaatttcagttcagttcttaggagtttaatatttcatctatattttaattaaccacagatattaggctttctcaaagataacattttgtcctaattttagtttctcaaatcgttattaaggttatgatggcaacccagcttgtgaagtaatagatgataataatatagtcaggaaatatcatttggtaaccaaggcttcagcaaagtattaagatttttgtgtttgtgagtgttataggtaacactgttggcccccaacattgtcattttgtacactttgttgatcagtggcctgaattcattaaaattcacactacatgcctcaaaaagaatattggatcccagcctaggttgttgagtatattcctgtcctttattaaaatgtaggttgatagaaaggtggtagggatatttaaatctatcatgctaatttactttctttgtatcacagcaaggatagggaattaggaaaagattactcactcaatagagaaaaggtagatagaaaatccagtattatcttgacaaagcagtgaatgttttagtatgattgaggataggtaatctagtgctaaagttggtcacagaatttcctgcacaaaatgaaagatctgtgtatgggaatgctagagaatttgacttctcagaaatatatagaccaacagtggttgccttttttcattttcacttctcttcattcttagatctacggaatccagaggcagcattgtctccaaccttccgtagtgacagcccagtgcctactgcacccacctctggtggccctaagcccagcacagcttcagcagttcctgaattagctacagatcctgagttagagaagaagttgctacaccacctctctgatctggccttaacattgcccactgatgctgtgtccatctgtcttgccatctccacgccagatgctcctgccactcaagatggggtagaaagcctcctgcagaagtttgcagctcaggagttgattgaggtaaagcgaggtctcctacaagatgatgcacatcctactcttgtaacctatgctgaccattccaagctctctgccatgatgggtgctgtggcagaaaagaagggccctggggaggtagcagggactgtcacagggcagaagcggcgtgcagaacaggactcgactacagtagctgcctttgccagttcgttagtctctggtctgaactcttcagcatcggaaccagcaaaggagccagccaagaaatcaaggaaacatgctgcctcagatgttgatctggagatagagagccttctgaaccaacagtccactaaggaacaacagagcaagaagggccatggagttggggagagaatgtctaaatctctgggggtatgaacgggtagatgaaattatttgggtgaagacaaatcaactgcaacgcatcattcggacaggccgtacaggtcactggttgaaccatgggaaggaacactgcttggtgagcagcagtggggcccaattcaataggtggagcacaaagaagaatcatttgatttcttactgagaaaaagttcaaaggtgtggtttcataaggtaatctgttatctgtggtgagcaggttggtgtcaaaggaaatccccaaggcttcaaccagggtctggattgtgatgtgatcgtagctgaggtatgtgcttcccaggcctccaaagcttccacatttttgttggtatcagttattcatgttgggtgtattctcatcccagatttttctcatttagatcataaacataatagaaagggctagaattgcaatcttgtgtaacttaaaaagcagctagtttttatttcctaggttcgttccaccagtcataaaccagatgaaatctatggcatgattgaaagactatctcctggcactcgcaagattgagttatttggacgaccacacaatgtgcaacccaactggatcacccttggaaaccaactggatgggatccacctactagacccagatgtggttgcacggttcaagcaaaggtacccagatggtatcatctctaaacctaagaatttatagaagcacttccttacagagctaagaatccatagccatggctctgtaagctaaacctgaagagtgatatttgtacaatagctttcttctttatttaaataaacatttgtattgt

SEQ ID NO: 2203 - DNA, 1919 bp, Homo sapiens
gttttattttctagaaaacgtcttatgaatttctcccatttgctctagcatgcttatagaaaatgtcagtgtttcttacagctcaaatttgtatagttgttttaaaatgcggtctctttcttcttcccctggtacttttttctttctgtctactgaagttagttcttatacatggtcttatattttggctgtctttttttccctgggaacattcatacaggttgagtgttccttatctgaagtgcttgggactggaagtgtttttgattttggattttggaatactttttttttttggagatagtgttttactcttgttgcccaggctggagtgcaatggcgcaatcttggctcgctgcaacctccgcctcccgggtacaagcgattctcctgtttcagcctcccaagtagctcggattacaggcatgcgccaccacgcctggctaatttttttgtatttagtagagatgggttttcaccatgttagccaggctggttgtgaactcctgacctcaggtgatccacctgccttggcctcccaaaatgccgggattacaggtgggcaccaccatgcccagccggattttggaatattttcataacacttactggtgagcacccctaatctgaaaatcctaaatctaaaatgctccaaaatttgaaactttttgagcaccagtatgatgccccaagtggaaaatcccacacccgacctcatgtgatgagtccaaactgttgtatgcacaaaattatttaaaatattgcataaaatgaccttcaggctatgaatagaaggcgtctatgaaatataagtgaatttcgtgtttagacttgggtcgcgtcccccacatatctcattttatatatgtgcaagtattctcaaatccaaacatatacagagtctgaaacacttctggtcccaagcgttttgaatgggggatactcaacctgtagtctttcttttaggaggggggaaaaaaaaagctttttttttttttggagacagagtcatgctgttgtcacctgggctggagtgcggtggtgcggtctcggctcactgccacctctgcctcccgggttccagcaattctcctgcctcagcctcccgagtagctgagattgcagacacctgccactacgacgggctagtttttgtatttttagtggagacttggtttcgccatgttggccaggctggtctcgaactcctgacctcaggtgatccacccgcctcagcctcccagagtgctggaattacgggcacgagccaccgcgcccagcccgtgtgttttttttttttaagtaattcgacgtggccctgctcttgatttgtatttattgtttatggtttgtgtatttcttcttcctattggaccacacagagttgaaaaacattatttttaatagaaaataataggtgtaggctgggcgcggttgctgacacctgtaaacccagcactctgggaggccacgtcgggctgatcgcttgtggtcgggagtttgggaccagcctggccaacatggtgaaagttcgcctctactgaaaatagaaagattggccaggggtggtggtgcacacctgtggtcctagctgctttggaggctgaggtaggagaattgcttggacccgggaggtggaggttgcagtgggctgaggtcgcaccaccgcactccagcctgggctacagaaccagactctgtctcaagagaaaaaaaaaaaaagaaagaaacaaagaaagaaagtaatggatgtaattagggaataaagtttttaggaggaaaaaggtaaaatttgatgtttgcgcttcagtgtgctccatgttgtttgattggattgccttgtataattccatagctgcttcgcttattaccagttacagcttatgtttgaagtcacaataaactcttcttcaaacatg

SEQ ID NO: 2204 - DNA, 1868 bp, Homo sapiens
attttcctgtactaataagatggtggtcaaagcaggggaggagagcagcagcgagtcgccgccgccgccgcgccgaggctggcgctgaaactttgcctcgccggggaccagcttccccagcatcagcccccacacggactaccaggtctcggaagagaaagcacaatttctaacccagctagtctgcactaggaggaagagtcatggaggagggatgtctggcctcacaacaggggccagtctttcgtgtccaggaacaggatcgatgacccttgtaggacactgggggcgctgttaccccctcaccgagcgcaggtcgctgccctgtggtctaacagagcatgtattcagacccgcaccctcatctttggcggatgctgaagatgcaagaaaagccacctgcttgatgcttgcttggcctggagatcgttctcctcttggtctgtgtcccgtggcggcaggccttgcagggaggggggcgcaacagtggggagcatccgaatggagtcccactttccaaccttggggctgctgcatcggcctcccacatgtgacctcccaggccctgatgctgcttcttttgaagggggtgaggcctgatgggcaggtcaagtcggtccttcagggaggggtctaccctcccttgcccgggggtggtgcccgccttggccctccgcttgcccttgtgcgcgtgctcagctgctgtgcttgccttttttggagtggggagaagaatgggatgacgtcggaggaaggaaaagactgtcttgcattcatagagagcactttatgcttttcctcgcccttgcagagtctgggtggtcccagtgggggctcaggacagtcagctcaagacagccaagtcaggtattattatgatcatttttatcatcatcatctgtataagacaaatgacacagccagttagtgagagggccaggactggaagccagggtatcggttttcccagctcccctgtcagaggccagatctggagtagtgggaagaggaggcagggggcaggtcttgccccttgccaggcctctgccccttgccaggcctctgccccctgtatctctgcttctgcctcagctgtcctgggtgaggtgggaggcacctagcatttagcaggtgattctcccaccctgccctggctctatggctcatagccagtggcttggagaggcagggccagatctcaggagtggagggcaacctcttccctggcttctaaaagaatccagagcccagtggggctcatgtcccattccaggttccagcatgccttgcctctgcttgctcgggctgcctacgcactagctacatacacctctagcttcatgtttcatgttggagtgtggggagaaaactgggttcttagcattagagagggaagtggcaggtggcagatacaagcttagctctgacctgggtgcacctcagctctgtgtccttttttttccctgacctgaagctgaccccagcagaagtcccccagccaacccctccacccaacaaccccccaccctcccatcctgcccccagccatagtgggagctgggaggattgcagcatctagtgccttccaaggctgttcctggagcgctgcttgtaaacccaagccaagctttgtcccacgtagggagaatggaaggtgactgcaatgtccctgtgcctttggctccatctccccattctgtggttctttgggggttcctgcttccctcaaactgaacactctcctgtccaacagcctgatggcttaattattgcctggaattgcccggcctccgatgctggaatcaaagattgccttccgaagtatttttgttaagatggcaataaaaagaaatcaatctcactctttg

SEQ ID NO: 2205 - DNA, 2149 bp, Homo sapiens
gagaaactgctctgccttcctgaggggcagccacagctcctgctggcccgtctcagcgcctctgcgacaacctcaggtgcgggcaagacagacggagggagagaagggaggaaggaaaaacggatgcaggaggatcctagacacggaggagacagaacccacaagagggggcggcggtggcgtggacggcgccgcgagggcatcccagcacacaggacgggtggagggctagtgacagcggaactctccccttcgacccggccgggtcaccgctgaggacagaccctagagcggcacttcgggggtcagtgaggtcaacacaaccgccacaaagacaccacgatcactgtcgctgccactttccctcttgcggtctcaggagggcacagggaggcctttggaggctgcgtcaccagggacggctccgccatgttgacagctaaaagagggggcgcgcttgtcttcttgtgctctgaatttctcagctttcaatttatttggttttttttttttttgagacaaagtctcgctctgtctcccaggctggaatgcagtggtacaatcttggttcactgcagcctcaacctttcaggctcaagtgatcttcccaccttggcctcccgagtagctaggactacaggcatgcgccaccatgcccggctaattttcattttttgtagagacggggtcttgctacatggcccaggctggtctcaaactcccaacctcaagcgatcctcgcctcagcctcccaaagtgctgggattacaggtgtgagctaccatgcctggcctcaacttctaacacactaacagccggcagacataatccacacagacacaggctcctggggctattggatcattctggatgatgtaaagggtcctgaaatccgtttgagaacccctgacctggaaagactccaacacagcgcacgtaaggatctgttccagcacattccacagcagcattcttcctagccagaaaacccagacacaccaactgaggctggattaaagtatgcaatctaattgaccaactatgtccacggggacaattctggcctgcacctcttttgttttggttttgttttttgttttgcttttttttgagacggagtcttgctctgtcgcccaggctggagtgcagtggtgggatctcagctcactgcaacctcccacctcccaggttcaagcgattctcctgcctcagcctcctaagtggaactacagacatgcgccaccacgtctggctaatttttgtatttttagtagagacggggtttcaccgtgttggcacgctgttctagaactcctgacctcaggtgatccgcctgccttggcctcccaaaacaccgggattacaatcatgagccactgggccccgccatacctgtttttataaatcaagttttattggaacaaagccacgcccaccggtttacagattgtctacagctgcttcggggccacaacagcagtggtgagtcaccctaacagaggccgcgccctctaccagggagccatcctgggggagggatgccgcagtgggtgggagctggtggtggggaccctccctcccgcagacagaagggcaggtctctgcaagggggccgtccagtggggacacctgaggcatcactgtgacaagtgactcttgcaaggccattcctgggccaccatttcaactgaggcatcagactgaccttaatcctgcctttgaggcatggaagtctctgggaatatttgtggttgtcatgactggtagggcaggatgctctggcatggagtgggtggaggccagggacgctgctccgcaccctgcagtgcccaggacggtcccagccagaggatgacctggccccaaacatccacagtgcagagcgggacaggccctgtgctaagagattgatttcgctttcattgtgagcctggcacagggctcactccgcccttcaaatccacaacctcattgaattcgcactgcgctgcagcgtggtgggtattagccctgtctaaaataagatgatgtgggagctggcgagtcgcgggccagggatgctgaaaagattatgtacagtgcagagcgttgtacccgagcaggttaaaggtgccgcaaaagacagctattgttattttgatgtgcagcc

SEQ ID NO: 2206 - DNA, 2551 bp, Homo sapiens
aaagcttgctggccgctgtgtagggctggtgagtggctggggctgtctgagccatgaacaacttcagggccaccatcctcttctgggcagcggcagcatgggctaaatcaggcaagccttcgggagagatggacgaagttggagttcaaaaatgcaagaatgccttgaaactacctgtcctggaagtcctacctggagggggctgggacaatctgcggaatgtggacatgggacgagttatggaattgacttactccaactgcaggacaacagaggatggacagtatatcatccctgatgaaatcttcaccattccccagaaacagagcaacctggagatgaactcagaaatcctggaatcctgggcaaattaccagagtagcacctcctactccatcaacacagaactctctcttttttccaaagtcaatggcaagttttccactgagttccagaggatgaagaccctccaagtgaaggaccaagctataactacccgagttcaggtaagaaacctcgtctacacagtcaaaatcaacccaactttagagctaagctcaggttttaggaaggaactccttgacatctctgaccgtctagagaacaaccagacgaggatggccacctacctggcagaactcctggtgctcaactatggcacccacgtcaccaccagtgtcgacgctggggctgctcttattcaggaggaccacctcagggcctccttcctccaagacagccagagcagtcgtagtgccgtgaccgcctctgctggacttgcctttcaaaacaccgtgaacttcaaatttgaggaaaactatacctcgcagaatgtcctcaccaagagctacctctcaaaccgaaccaactccagggtgcagagcattggaggggttcctttttacccaggcatcaccctccaggcctggcagcagggtatcaccaaccacctggtggccatcgaccgctctggcctgccgctgcatttcttcatcaaccccaacatgctacctgacttgccaggccccctggtgaagaaggtgtcaaagacagtggaaactgctgtgaagcgctattatacattcaacacctaccctggctgcacagatctcaattctcccaacttcaattttcaggccaacacggatgatggctcctgcgaggggaaaatgaccaacttctctttcggtggggtttatcaggaatgcactcagctctcagggaatagggatgtcctcctctgccaaaagttggagcagaagaatccactcactggtgatttctcctgcccctctggctactccccggtgcacctgttatcccagatccacgaggagggttacaaccacctggagtgtcatcgaaagtgcactctcctcgtcttctgcaagaccgtgtgtgaagatgtgttccaggtggcaaaagctgaatttagggctttttggtgtgtgaccagcagccaagtacctgaaaactcaggactgctttttgggggcctcttcagcagcaagagcataaaccccatgacaaatgcacagtcatgcccagccggctaccttccactgagactctttgaaaacctcaaggtatgtgtttctcaggactatgagttgggaagcaggtttgcggtcccctttggcgggttctttagctgcacagttgggaaccccctggtagatcctgctatatccagagatttaggggcaccgtctctgaaaaagtgccccgggggcttcagccagcacccagccctcatcagcgatggatgccaagtgtcctattgcgtcaaatccgggctcttcacaggagggtccctgccccctgccaggctcccacctttcacccggccacccctcatgagtcaggctgccaccaatactgtcatagtgaccaattctgagaatgcgagatcctggattaaagactcccagacccaccagtggaggctgggagaaccgatagagctgcggagggccatgaatgtcatccatggggatggtggtggtctgtcaggaggggctgcagctggggtcacagtgggggtcaccaccattctggctgttgttatcaccttggccatctacggcacccggaagttcaagaagaaagcatatcaggcaattgaggaaaggcagagtttggttccaggcactgcagcaactggagacaccacttaccaagagcaggggcagagtccagcttaaatctctccccgaaaatggtttctctcatctccagtgtggtcattgctgaccactctgttttcctaagcattgaaatggcaagtgcaaccaaaagtaggtatattcgtgacttcttgtttaggtctctgggccaggaaattcatactgttacatggataaggttgggattggggagagggaacagttgggactagaagcaaaagtgattctgggactaaaataggaagcagatgtcctttcccaatgtgtgttgctgtcttcacctgaatgcatttgtgtaaaaatagcggagggacaatgtgaacatttgtatttggaagctatgaatttactctgaaaaaaaaaag

SEQ ID NO: 2207 - DNA, 2017 bp, Homo sapiens
cagtgaatggaaatgtttcataatatatatttttcagttttttaaaataaatcaaatttatttgtatgtttcctgcttttgaaaatgcttggttggggctgggcacggtggctcacgcctgtagtcccagcactttgagaggccgaggcgggcggatcacgaggtcaggagatcgagaccatcctggccggcatggtggaggcctgtctctactaaaggtgcagagattggccgggcatgatggcgggcgcctgtggtcccggctgctcgggaggctgaggcgggagaatcgcctgaacctgggagatggaggttgcagtgagccgagattctgccactgcactatagcctggagagagagcgagactccgtctcaaaaaaaaaaaaaaaaaagaaaaaaagaaaaaaagaaaatgcttggttgatctccttaaagacacaaatcttgtgtttcaaaagaaatatggcaaagaaacttacaaaaccaaacttatccataccaactatttctgtccatctttctacctatttacctgtacatctgtcatctatctgtcatctatttttctcacacacagtagaagcagatgtcattttccttcctgcagtgcttcacatgcctaagagccctaaggaggaggtttgaagggctatctttatatttttcagaaagaagaaattgaatgaatagaagacttccatttcatgattaagtcagcctaagatgaatgctattttggggaacctttgcaaggtcaatttgttgagaaatagactgagagagctgggtttggtgacatgcacctgtagtcctggctacgccgtaggccaaggcaggaggattgcttgagcctgcaggttgaggctgcagtgagctatgatcatgccactgcactccagcctgggtgacagagcaagaacccgtctctaaaaaaaaaagaaagaaagaagagaaaaagaaatagataaagatatccatttcagggaaacttgttaaatgagccacaaatggttacaactttaaatttataaagaagacatgaggccgggcacagtggttcacgcctgtaatcccagcactttgggaggctgaggcgggcagatcgctttaggtcaggagttcaagaccaggctggccaacatggcgaaaccctgtctctactaaaaatacaaaaattagccaggtgtgatggtgcatgcctgtagtcccagctacttgggaggctgaggcacgagaatcgcttgagccgagatcgtgccactgcactccagcctaagcgacagagcaagaccctgtctcaaaacaaacaaacaaaaaagaatacagtttactcttggttgaagtgaagtcagtaattcaggggtgttggacaccagccaagattgtttatacaccccttggagagaccgtccatagtttggcttgatgcatgacatgggggaagcgggtatcagaggtaggggattcctaactgtccagctttaaatctcagctccatcacctacaggctgggtggctttaagcaacagcctattctatcttcctaagcttcagtctccccacctatgaagggggagggtgataacattacctcctcacaggacccatgaattaatatatatccaaagctcttggaacagataataagcacttaataaatgtttcttgtttttgtagttattgatgatattattccaaaattcccaggaggacggttataaaatgttctcatctgccaggcacagtggctaacgcctgtaatcccaacactctgagaggccgaggcaggtgggtcacctgaggttaggagttcaagaccagcctgaccaacatggagaaagctcatctctactaaaaatacaaaaattagccgggtgtggtggtgcatgtctgtaatcccagctactcgtgaggctaaggcaggagaattgcttgaacctgggaggcagagattgcagtgagccaagatcgccccattgcactccatcctgggcaacaagagcgaaatttcatctc

SEQ ID NO: 2208 - DNA, 1935 bp, Homo sapiens
gggatcagtggagcgccgagcacctagatgacattgccccggcgaggctccgggctccccgcccacgcgcagagctttccgctcgtcccagctgcacctcggtcctgcaggccgtccgcctggcgcagctgtagccatagcaactcacgcaggaccgcgctttacagtttaccaggcactcggacgcctttggcgcgagcgcccgtcgctccttcctcaggtcactgcggtgcaccgtgcgggtccgcgtcgtgtcctccgctccggagcagggaccgggcgtgctcgttcagtcctgtgcgcactcggaatggggccggggaaggctgagcctcagggcgaccctgatgtggagccgtgcgaccgctcactgcggttgaagagacccaggcgcagacagcgcaggcggggtatgtattggttggagtatgatggggtcaggacttgagtcttttacccaggcccggagttaacggcattgaaccccttctcattttgtagaggctatgtgacccgcgagatggaccaggttaaatgcagaggcagatacaaaaaaccagccatcttaagccagacatatgcaaagtagccaagcagcgcttcttatcttactgagtcccttcttgctaggaggaaattgttattcagaagtttgagttttagattttttttgttttttttgagacggagtctcgcactgtcgcccgggctggaatgcagtggtgtgatctcagctcactgcaccttccgcctcccgggttcaagcaattttcctgcctcagcctcccaagtagctgggattacaggcgcccgccaccacgcccagctaatttttgtatttttagtagagatggggtttcaccatcttggccaggctggtctcaaactcctgacctcgtgatccgcccgccttggcctcccaaagtgctgagattaccggcgtgagccaccgtgcccggcctttttttgatgtcattgttgagatggagtctggctgtgtctccaggctggagggcagtggcgcgatctgggctcactgcaacctccacctcccaggttcaagcgattctcctgcctcagcctcccaagtagctgggactacaggtgtgtgccaccatgcccagctaatgtttttatttttagtagagacagggtttcaccatgttggccaggctggtctcgaactcctaacctcaagtgatccacccacctcagcctcccaaagttctgggattagaggtgtgagccactgtgcccggccggtttttaatttttataaagaccaggtctttgctctgttgcccaggctggagtgcagtggcatgaccatagcttactgcagccttgaactcctgaggtcgagcaatcttctagcctcaacttcctgagtagctaggactacaggcatgcaacaccgtgcccggctaagacatcctactttaaaatatgtcaaacttcacagcacagttctttttttaaaatacagatttaatgagataatttacatgtcatacaattcaaacattgtaagtacacatttggatgacctttaatttatactgttgtgtagccatcaccataatccacttatagaaaacttccatcaccccaaaacgttcccttgggcctatttgtagtcagtctctgctctcacccccagccaacctctgatctactttgcatggtttttgccttttccagaaatttcatagaaatggaataatagcatataatttttttggtctggcttctttcacttagcatcacgtttctgaggctcatctgtgttgtaggtatgagtggtttgttccttttcattgctgagtggtattccattaatgcaattgtgtcatcatttgcttatccatttatctgttgatagacatttggattgtttctagtttgggaaataaataattctgttttgaactcaat

SEQ ID NO: 2209 - DNA, 1834 bp, Homo sapiens
gactagcgccgtcccctaccgcccgtcgaccccacttccatgtctggcggacacagctccccggaacctccacgcccatggccactagacagagggagtcttccttcacctcctgcttttccacctggaattgcgacgcgggcgacgagggcatgggctgcacctgcgaagatgcttccttgtgcaagaagcgcctgtcgggcgcgggattcggggctggcatctgggacgcgggctgaggtgggaggcgggcctgcatctgaagaatacgctcggaggctggcaggttgctgcccccgcctcgcacgaccctcgcttcccacctgtgaaatgcacagaacagggcttcatttatttaacgaatcgtttctgagctcctgctgtgagccaggcttggagcaagcctgggtactgtggatgggagcaggcccctgaaccaggcggacggggtcttggcgttctcggagctaaacgctgctagaaagacaaacatgatgcacctaactactgtctccgtagattatgaggatgagaggtggaggttctctctcttttaggtatgatccccgttgtgcacctgaaactcaggcgatgactttcagtgaaggaaatgacctgtctagggccacataatacctgtttgaaaagccagtaccacactaagtctccactattaagggtgtgatggtgagggtggggtcgtagggagcacaggtatgtgtcagaaagagaaaacatgaggcttgagtgtcctccatttattcactcattcattctacaaaaatggagagcttactttgtgccagggccttatttgggctggttggtggggattcagtaatgggaatacaccaagaacaagacagacgtgctgccagacatactggaactcacggtttagttgggaaagactgacaggaaataattatccatgagccactgtgcctgcccaggaactgcccttttaatatctgccttgtgcaatcagttacccagacttcttattttattatttttatttttttatttttttgagtcagagtcttgctttgtcgccaaggctggagtgcagtggcgtgatctccgctcactgcaatctctgtctcccaggttcaagtgattctcgaacctcagctacgcgggaggctgaggcgggagaatcgcttgcacctggaaggtggaggtggttgtggttgcggtgagccgagatcccgccattgcactccagcatgagcaacaagagcaaaattccatcacaataaataaataaataggaaagtgcctagtgttcatctctgccactggaatagacacaataccgagcacagaccatgcctacctttatgccacatgcacaaataaatatttgtcagctggtcacagtgacagggactgagcacacatgttcaagattgtatttcctgatgaggtcttaaaattctggttttctgtttcattggttctgaatggtctatgtgttctagagagcagaccagggcttataaggctgaaatttcattgtgaaaattatggtgcttaatctgatttctcaactgaaaggagaaatattcccccttgacatagaagcaggtcacagggtcacctctggggaaaaccagcttttccccgagggcttagcccagggcctttccggcacccagatcgcatcttcttagctgtgccccagagaatgaggtcgagattgtgatctgaaatattttcaaggcaggtgctgcttttcatgcccaaagaaggcatgccacttcagagctagaacattctgttgcacataaattagctgtaaaacttgcccatcaataaagtcagataaatc

SEQ ID NO: 2210 - DNA, 2951 bp, Homo sapiens
ctcaaggccctcttgggccaccatgcttttgcatatgctgtccctggtcccggaagcaccctctgccagcctgcctcgagcacatgcctaattgcccttccatgctctgcctaagtgccgctcctctgggagtcctccccgcctggaatattgttggacgctcccctggtgtccccacagagtctgtatgtatctgtgccatgccagttcacagcaccccattgtaactgtatttgcgtgtctgtccccgttactccacccccatgtccctatgcccatgaggccccagagggccaggactgtggcttgttcatttgcactgtgcctggcactcagtagggactcagtgaatgaatgtggaatgtggttcacacagccagggagaatgggataccagccagggcaagaacagtctactgggtggggcaggatccaggacaaggaggtgagcagcccttcctccggccactcaagtagtggggactgggaggaggggcgctttgtctacgcagtcttcttatggctcatcaccgtacagacagggcacctgcctcctgccacgctgacttcaggactggtcgagccccagggaacatttgcagggcagcccaactttggccctggccctggcgctggccctggctctggggaggatagaaagtgtgctggatacagtcagacagaactggctgccactttggatttgatcccttccaccttggcaagcttgggcaagttgcttaatctttctgagcctcgttgcctcactagggacacaggagctgaggctgcttcccttgttggaaagcactgaagcccaggaatcgacccacaataggccttcaacaaataccacttctcaccttatgggtgaaatatggcactggaagtaatgctcttcgctgtgggagctacagaaagcaatgaggtctctatcaaacccagtctcctctctctcgagaggaaccagtggggataccctaccccccaaccccaaagccctgtacacctgggggtaaaaatctgggtgccacgggctcaggaaggcttgcttgggagcaagagggaggtgggtgtgtccggggaggcatttctgagcacaagagcctccctggagttttgccaccatctcctcccattctgtggtgcccgcgataaccaccattctgactctcctcacccctccagcctcccggcgtgtggcctgccaacccggctcccattgtaagcctcttgctttctttttggatcgtcctcattttggcttttctgggctcatggaggaggcagggccaggcattgggcctctcccattgggagtggggagggcacagaccagacccttgaccatctgcccggcctggtgaggttgggggttggatgtgggggttggatgaaacaacctgagttgccaccccgtgggcagccacggaagaccatgccccacattcacttctgtcacctgcaaagggaggctaggctgagagacgtttccccgagaggaaagatgggccagagccaccagcgtccccatctgtcttctccagggttctaacctttgcccctcgctcatccccttgagagaagagacacctgggcccaccctctgtggggtctgtggggccattgggcttgttacgccccctggagggtgcctgccgtgtggcgccctctggtgggagctggtggttttcacacgtgagagcctgggtgagacctggtttctttcttccagacccagacagtcatccacacagtgcagagcgcccctggacagatgttctctactcccgccatcccacctatgatgtacccccaccccgcctatccgatgcctttcatcaccaccattctgggagggctgtacccatccaagtccatcctcctgtcaggcactgtcctgcccagtgctcagaggtaagccaagggctccagtaacctctgggaagagagagcccttcaaggtcagtccagccattcccctggcttcaggaaggctactgatgatggggaggaaatgggactcagaattcggtggataaaggttcaggtgggctgcccaccccaggttccacatcaacctgtgctctgggaaccacatcgccttccacctgaacccccgttttgatgagaatgctgtggtccgcaacacccagatcgacaactcctgggggtctgaggagcgaagtctgccccgaaaaatgcccttcgtccgtggccagagcttctcagtgtggatcttgtgtgaagctcactgcctcaaggtggccgtggatggtcagcacctgtttgaatactaccatcgcctgaggaacctgcccaccatcaacagactggaagtggggggcgacatccagctgacccatgtgcagacataggcggcttcctggccctggggccgggggctggggtgtggggcagtctgggtcctctcatcatccccacttcccaggcccagcctttccaaccctgcctgggatctgggctttaatgcagaggccatgtccttgtctggtcctgcttctggctacagccaccctggaacggagaaggcagctgacggggattgccttcctcagccgcagcagcacctggggctccagctgctggaatcctaccatcccaggaggcaggcacagccagggagaggggaggagtgggcagtgaagatgaagccccatgctcagtcccctcccatcccccacgcagctccaccccagtcccaagccaccagctgtctgctcctggtgggaggtggcctcctcagcccctcctctctgacctttaacctcactctcaccttgcaccgtgcaccaacccttcacccctcctggaaagcaggcctgatggcttcccactggcctccaccacctgaccagagtgttctcttcagaggactggctcctttcccagtgtccttaaaataaagaaatgaaaatgcttgttggcac

SEQ ID NO: 2211 - DNA, 2354 bp, Homo sapiens
tccgccccgcgccgggctctagctgtttccctcaggcggcctgttccacgccaggattagttttgcttcgcagatgggccgtggtggtgagaggaagcaatcagtatggaaatggagaaatggcttaccatgcatgtccttctccccaggagggaggtcgtggtgcaggcgagcagacgccagactcctggacacttgccgcctgcgttatggaggcttagctaataaccttgcaggggtcttcaggcttttccactggctcacctttaggcttctgacacttttacctacgattgaaaaaagacgagattccatgagactagaaatgtaggagcatctcagaccttcacagaatgctctgttagaagatgagaaacataacgttgcttgtgagaggtgaagccagctggacttcctgggtcgagtggggacttggagaacttttctgtctagctaaaggattataaatgcaccaatcagcactctgtaaaaacacaccaatcagcgctctgtgtctagctaaaggattgtaaatgcaccaatcagcactctgtaaaatggaccaatcagtaccctgtaaaatggaccaatcagcaggacgtgggcagggacaaataagggaataacagctggcgcccctagccagcagtggcaacccactcggatcaccttccatgctgtggaagctttgttatttcacttttcacaataaatcttagtgttgcttactttttgggtccatgccaccttgaagagctgtaacactcaccacgaaggtctgaggcttcattcttgaagtcagactaagaacccaccggaaggaaccaattccagacacacgtgtagtagcaaattaccaaaaatgttcattgccttttctgaaaaacaattttcccagaaacacctggcagaatcagagttcattgtgtcaaaagaaaaactttggacaaattaaaatgagcaaagaacaatttgtgaaatgtgcccctctcccaaccagaacaggttcaaagagactccagtgctgccacatgatcaaagaattatggacaaaaaaagcaaataaattacaggaaaagaaaatgagataatgcagtagttactttttgaaggacgaccgaagcaggatatttccctgaccccttcatgggacccacgtcagaggtgtttactcagcctgctgcccacaactcctcacaggagggagcgcacaagtgaacgagggtgaggactggagagcaccagcactggaacaacccggccacttcggcgctactgggatcaaactccatcacttggacacactgtgttccacccctcgtgggagggagcatgcaggtgagaggatgcaggagtcagggtgagcacttttgggctccagcaggagcaaactctgtgcagggccctgcagcagtgactgaggggcggcctgtgactcccaaagccccagaggacatgctacagtgctcttttagctctaccatccgtaggtggcttaagtgtaaacagctcagtgggccctttgcctttttgcgtgaggcagctgccctaagcaagagtaaagggccagtgtcacagccttctgtatctgcactcatgactcctgagctcttgtcctgcattcagggaaaatgaggttacacaaaagaattcacagatggtaaatgcggggtattttattcccagtgaaagtggctctcagcaggaaggagagcagaaaaggggatgggctgggtaggtaaccttcccctgaagtcctgccatctctggctggatttttctccaaagttacaccatcaaaatgtccctctgaaatcaagccacttctctctgacatccagccgtagtccctcacgtccagttgcttctcctctctgctggctgagtctgtggtctttatagcacaggatggcgggcagggtgggccatgggtaatttaggaaaaagcaacatttgagcagacaaaagggagagaagttctctactttgggctgcggtttcaggctttttggcttgagggtggggttttgtcagggaccctcccttttctgcctaaaatttctctgcctcctgcctctatcactgtatcactagtttgaagtaaacccatctggaattactgattttaacaaatcacacagaatttcaagcacctttctatgcaaatgacttgtgaagacatagagtatagtatgccgttaacaaacagcccagcagtgtgccttgcaccttgtaggtgtacaaaatattaagtcaattttataattgaaggaggtaattttaaaatgctacatccatgttgtgtaattttattcattggtcattttaaataaaaacaaaagccagaataaaac

SEQ ID NO: 2212 - DNA, 1926 bp, Homo sapiens
tttaaaatattcttcatccagagatagaggtggttcttcctcttacggactgcaaccttcaaattcagctgtggtgtctcggcaaaggcacgatgataccagagtccacgctgacatacagaatgacgaaaagggtggctacagtgtcaacggaggatctggggaaaatacttatggtcggaagtcgttggggcaagagctgagggttaacaatgtgaccagccctgagttcaccagtgttcagcatggcagtcgtgctttagccaccaaagacatgaggaaatcacaggtgagatcgatgtcttattgtgatgagtctcgactgtcaaatcttcttcggaggatcacccgggaagacgacagagactgaagattggtcactgtaaagcagttgaaagaatttattcagcaaccagaaaataagctggtactagttaaacaattggataatatcttggctgctgcacatgatgtgcttaatgaaagtagcaaattgcttcaggagttgagacaggagggagcttgctgtcttggccttctttgtgcttctctgagctatgaggctgagaagatcttcaagtggatttttagcaaatttagctcatctgcaaaagatgaagttaaactcctctacttatgtgccacctacaaagcactagagactgtaggagaaaagaaagccttttcatctgtaatgcagcttgtaatgaccagcctgcagtcaattcttgaaaatgtggatacaccagaattgctttgcaaatgtgttaagtgcattcttttggtggctcgatgttaccctcatattttcagcactaattttagggatacagttgatatattagttggatggcatagagatcatactcagaaaccttcgctcacgcagcaggtatctgggtggttgcagagtttggagccattttgggtagctgatcttgcatttcctacgactcttcttggtcagtttctagaagacatggaagcatatgctgaggacctcagccatgtggcctctggggaatcagtggatgaagacgtccctcctccatcagtgtcatcaccaaagctggctgcgcttctccgggtatttagtactgtgctgaggagcattggggaacgcttcagcccaattcgggtcctccaattactgaggcatacgtaacagttgttctgtacagagtaatgagatgtgtgacggctgcaaaccaggtgtttttttctgaggctgtgttgacagctgctaatgagtgtgttggtgttttgctcggcagcttggatcctagcatgactatacattgtgacatggtcattacatatggattagaccaactggagaattgccagacttgtggtaccgattatatcatctcagtcttgaatttactcacgctgattgttgaacagataaatacgaaactgccatcatcatttgtagaaaaactgtttataccatcatctaaactactattcttgcgttatcataaagaaaaagaggttgttgctgtagcccatgctgtttatcaagcaatgctcagcttgaagaatattcctgttttggagactgcctataagttaatattgggagaaatgacttgtgccctaaacaacctcctgcacagtctgcaacttcctgaggcctgttctgaaataaaacatgaggcttttaagaatcatgtgttcaatgtagacaatgcaaaatttgtagttaaatttgacctcagtgccctgactacaactggaaatgccaaaaactcgagtctttaattgtaatgactttgttttatccacagttaagccgtttctcattacatatttatgtatttcactgtcatgtcaacatgtctgcagaatcactgtatgtaacaaacagccatatttaagacatgcctggataaataaaattggtaggaatgttttcttgcc

SEQ ID NO: 2213 - DNA, 2055 bp, Homo sapiens
gtagtgtgacattcctgcctgcctgaggaagaaatggtgagcaggggctgcaattgcagacaagtgtcacccagaagccacaagtttctgtgagcaccaggtctacaaactacccaaggcatagcaatggcattatcactggaagaattcgtccactcccttgacctcaggaccctacccagggttctagaaatccaggcaggcatctatcttgaaggctctatttatgaaatgtttggaaatgaatgctgtttttcaacaggagaagtgattaaaattactggtctcaaagttaagaagatcatagctgaaatttgtgagcagattgaaggttgtgagtctctacagccatttgaactgcctatgaattttccaggtctttttaagattgtggctgataaaactccataccttactatggaagaaatcacaaggaccattcatattggaccaagtagactagggcatccttgcttctatcatcagaaggatataaaactagagaacctcatcataaagcagggtgagcaaatcatgctcaactcagttgaagagattgatggagaaataatggtgagctgtgcagtagcaaggaatcatcaaactcactcatttaatttgcctttgtcacaagaaggagaattctacgagtgtgaagatgaacgtatttacactctaaaggagattgttgaatggaagattcctaagaacagaacaagaactgtaaaccttacagatttttcaaataagtgggactcaacgaatccatttcctaaagacttttatggtaccctgattctcaagcctgtttatgaaattcaaggtgtgatgaaatttcgaaaagatataatccgcatcctccccagtctagatgtcgaagtcaaagacatcactgattcttacgatgctaattggtttcttcagctgttatcaacagaagatctttttgaaatgactagtaaagagttccccatagtgactgaagtcatagaagcacctgaaggaaaccacctgccccaaagcattttacagcctgggaaaaccattgtgatccacaaaaagtaccaggcatcaagaatcttagcttcagaaattagaagcaattttcctaaaagacacttcttgatccccactagctataaaggcaagttcaagcggcgaccgagggagttcccaacggcctatgacctagagatcgctaagagtgaaaaggagcctcttcacgtggtggccaccaaagcgtttcattcccctcatgacaagctgtcatccgtatctgttggggaccagtttctggtgcatcagtcagagacgactgaagtcctctgtgagggaataaaaaaagtggtgaatgttctggcctgtgaaaaaatcctcaaaaagtcctatgaggctgcgctgctccctttgtacatggaaggaggttttgtagaggtgattcatgataagaaacagtacccgatttctgagctctgtaaacaattccgtttgcccttcaatgtgaaggtgtctgtcagggatctttccattgaagaggacgtgttggctgccacaccaggactgcagttggaggaggacattacagactcttacctactcataagtgactttgccaaccccacggagtgctgggaaattcctgtgggccgcttgaatatgactgttcagttagttagtaatttctctagggatgcagaaccatttctagtcaggactctggtagaagagatcactgaagagcaatattacatgatgcggagatatgaaagctcagcctcacatcccccacctcgccctccgaaacacccctcagtagaggaaacaaagttaaccctgctaaccttagcagaagaaaggacggtagacctgcccaagtctcccaagcgtcatcacgtagacataaccaagaaacttcacccaaatcaagctggcctggattcaaaagtactgattggtagtcagaatgatttggtggatgaagagaaagaaaggagcaaccgtggggccacagcagtagcagaaacatttaaaaaaaaaaaaaaaaaaaaaaaaacc

SEQ ID NO: 2214 - DNA, 2462 bp, Homo sapiens
gtcaggcactgccctcgaggtcagatggggtggggctggatactggccatgaggattttttcaagagctgggttaatagtgagacgggcggacaccagatggctcgggctaagaagtaagtgggcggtgggaagctagaagccgtggtgtagacctactttgagaggttgggctgttcagacagggagaaagttcacagtttgaggaggtagataggtcaaaggaagagggtttgcttgtttttgagattggggcatcctgaacgttctcccaggccaagtgagaagaaaccagaagaggaacatgtcacccaaatgtgctgaaacagcccagcagctgcgctgcctcacagaaaatgtgcagaggcccctctgtcccaccatgcctgcctggggacggccttcactcgggctactcagggtttccccagcctgccaacccaagggtggcaggagctgtgggtgctcccagccccttctcaaggttggtctgtgggtagaaatgtgggctgcctcggggcgtcacagctacaaatgcataccagccctcagaaccacattcctgctccccagccctttcctccgcacccccatgcagaagcgcggccgccagctcacaaaggatagggagggatattgctcttggcatttgatgggaagcatctgctgcatcccattggggtgttgcccaggatggattggaaaagagttggcaggaaggctgagctctgtgctcacaacctggcttggtggtggccgaggagcttggcaggagcagagtgcaggacctgggaactgggggttggtgcatgtgtgcacgcacgtgtgtgtgtgtgtgcgtgcgtgctgggtgggtagggaggaagctgtgaaaccacatcccctcctctctgctgctgtgttgctgtgtgtttcagcagcacgtgggtgtcaccacacttcctagcaggtgtcaacctccaagactgttctgggctcttctcccagttggctgagttggaggtgggagtcccaactgtcccctgtggcttccagagtgggaccttgctgtgggataggctggccaatggtgctccctcccctgtgacccttctgttgggtgggtcacgaggaaggactgtgggtgttgcccacagacaggtggacatgtggcaaggacaccttgggaccttctttctgacgccccttgaagggggcactttctcagctttgagatgagtctctgtggatgtgggaagttcactatctcaagagcagcagccttggaaaatccaacacagaaccccgagtaggggcgggaaggggtcctgtcccgctcactggctgcctggcagagttctgcaaggaagcgcctgtgttgctgtgggcggaggaatggactgagggctacattcgcttcctgttgccgctgtaactgcttatcacaaactcagtggcttaaagcaacagaggctccttcctttacagtgctaagggtcagaagccgatcagtctcaccggactaaagtcaaggtgttggcagaatccattcctgcctcttccagctttgggtgggaggctctgctggagttccttggcttgcggctgcatccctccagcctctgcctccatcctcctacagcctcctccttctctgcagtcagatctccctctgccttcctcttttttttttttgagacggagtcacccaggctggagtgcagtggcacaatcttggctcactgcagcctccgcctcctgggttcaagcgattctcctgcctcagcttcccgagtagctgggattacaggcatgtgctactacacctggctaatttttgtatttttagtagagacagggttttgccatgttggccaggctggtcttgaactcctgacctcaggtgatctgcctgcctcagcctcccaaagtgctgggattgcagccatgagccatcacacctggcctgcctccctcttaaaggacgcttgtgatttggggcccacctgggtaatctcttcatctcaacatcttcagttacatctacagagtccctgttgccacatgaggtaacacagtttgggaagggagagttattcagcctaccctaggggcctgtggtgtatctcagggcccttctgattttaagatataaagcaagaaaacaaactggctcaaggggaaaaaaggacacgttgaattctgttgctttaaatgtatatttttttattgtgctaaaatgcacagaacataaaatttgccattagtaacactgagtacattcacagtgtcgtgcaaccatcagcactgtctagcgccagaactttttcatcaccccaaagggaaaccccgtatccatgaaggactcactccccattcgccctctccagcccttggcagccaccagaatgctttctgtctccataaattcatttttaataagtgcaattctgtgtgactttaaaataaataaacatgagcacg

SEQ ID NO: 2215 - DNA, 2430 bp, Homo sapiens
atcaagtatataatgtgttcagtactaactcttttcaacttctcactgtcaaacgtaccccacatgaggcatggagagttcctctcactaccaaaactaataaaacaaaaggactgccggactgtccaaagaaacctacaaatgggccttttatagtgacttcaattttatgggataattgtaatgctcccaaggctgttgtactccaaactctagccatgggtattgttattgattgggctccaaaaggacattattggcaagattgctccagcaaaaataccttatgctcggagtttatttattccttagattatatagagcatgggtggcagtcttacacgatgagacaacgggtgtctccttacccatttaaatggatggacacaggtattgctcctcctagaccaaaaattattcatcccttttttaccccagaacatcctgaactatggaaattagctgcagctttgtcgggaataaagatatggaacactacctatcagctccttcgtactaaaaccaaaacacccacattcaacatcacccttatttctgaatgggtgatacccattaggagctgtgtcaaacccccttacatgctgttggttggaaatataattatgatgcctgatgcacaaactatagaatgtcataactgtaagctgttcacttgcattgatgcaacttttaatcccactacaagtattctcttggtaagggctagggagggggtatggataccagtttctctacatcgtccatgggagtcttccccctctattcacatagtcaatgaagttcttaaagacatcctcaaaagaacaaagagatttatttttactcttattgcagtccttgcaggactacttgcggttactgcaacagcagcaactgctggagttgccatccgcagttctgttcaaactgctcactatgttgaagcatgccagaaaaattcctccagactttggaattctcaggcgcaaattgatcaaaaattagctaatcagattaatgatctccgccaaagtgtaacctggctgggagatagagttatgaacttgcaacaccgtatgcaattacagtgtgattggaatacttctgattattgcataacgccttatgcttataatcaagatcaacatagctgggaaaatgtctcaagacatttaaaagcctgggatgataacttaaccttggatatttcacaacttaaagagcaaatctttgaggcttcacaagcccatttatccacagttcctggctcacacatttttgaaggcataactaaacaattacctgattttaatcccttcaaatggctcaaacccgtcagaggatcattgttgttactggcattattaatattggtatgcttatgttgtctccttttagtctgcagatgcctctaaggagtccgaaaccaagtccgaagtcaacaacaagcaatgatggcgatggcgattctagttaataaaaaggggggagatgtgggcggcaagccacccaggcaccgaggcaagagacagaggacacgagctgttccagtataataaaatataaaacaagaatagttataccagatatagatcttagatatgattatatacgaatatcattaatcatgagtttgtagcaattactttttattccaatattatgataatcctcgctctataatcatagcctaggaaaaaccaggccatacagagataggagctgaggggacatagtgaagtgtgaccagaagacaagagtgcgagccttctgttatgcccggacagggccaccagagggctccttggtctagcggtgacgccagcgtctgggaagacacccgttaccaggcggatcgtggcccagccgtagcaaaaggtgtcaaggaacaccttttgcaaaaggtgtcaacacccgctacttagcagactgggaaaggggggcggtctccctttccccgggggagtttagagaagactctgttcctccacctcttgtggagggcctgacatcagtcaggcttgcccgtagttatccggaggcctaactgtctccctgtgatgctgtgcttcagtggtcacgctcctagtctgccttcattttccatcctgtacacctggctctgccttctagatagcagtagtaaattagtgaaaatactaatagtccctgatatgcagaaataatggcataagctgtctttctctctgtctcctctccctctctgcctcggctgccaggcagggaagggccccctgtccagtggacacatgacccatgtgaccttacctatcattggaggtgactcacattctttaccctgccccttctgccttgtatccaataacagcgcagtcagacattcagggccactaccggtctccgcacattggtggtagtggtcccccgggcccagctgccttttctctt

SEQ ID NO: 2216 - DNA, 2127 bp, Homo sapiens
catttggctcttcctgtttctaggggttatctgccttcctgagggcagagcaaacagccctgctatccctgctgcatagtacagcctgccagtcccatcatttcccagaaggcagcagacagaatgaagaggcaaaaggggaagtgcctacttaacacagctcagggatgacaaccaggatggtgtcgctgatgatgatgatgagaagctcttcttcctggatatgcggtgctttgatgtgctggctctgactagctctgaccctgtgttcccaagacccagggagcctttgaggacacctcggggggagcaggtcataagccaatgactcattcgtgttgggttgtggggtgagtggtaacctccaaaatgtgctcctgctccctccctgcatgggaagtgaagccaaccgaggcagaggtggcctgtctgggccaacctttccctcaaggtggcagaaatgcccccatcagaaatgctcttttagagcaaacattgtcccctccaggagcatcttaaaatgtaaatatgctgggacaatgtgtgccttctgtgttccgggccctgaaaacactgcaagaggagaaaagctacagcctctacccccttattttcctgaaggtagactggagagtgcagaggcttcccccacatttcaggctcccctgcggaatgagaagcagcctctcgtccccttgtcagtgctgagcccataggggtggtagccaacacgagaggcagcgaagcctgttcaaacttgtatttattttctaagaggtcgggatgagggcatggggatggggatgcataacttgggtttcgggaggagccacagaccttggggagaaggatggagcctcctgccctcagtcgtgctgctagtaggggtgattcagggtgtgctccatgatggtccgaagcgccatccacgtctcctgggccgtggggatgatctgtgtggccggcagcaggaagccatactgcccagtgtcccggagctcaaagctgaaggcgtacttgatgccactgtcataggcccagtcgacggtgatcccactggccacatctagaaacaaaagttccaaaatgtgccccacaaaaggaagaaggggatgtggctgcaaggtacagaggcatcctgggtggaaagtgagccctgggagccaaacccccacccaccccaggccacaccaggcttcctgcccaggcctcaaacaggatcacatctgtgcacccagcccattctctactcctgcaaaaagaaagctcctgcaggctactaggcttaggaaccttgcagtaagccaggcactgggagctgtgcacaaaagctgccaagaaacagctccctgggtaccactgttcacccttctatccagtgtgggaggcagctttgggccagcacagctagatccttggcactgccctgcagccagccccaggtagatgtggtgtctgaagcagggccaggggaggctcactcacagagggtggtgctgatgctgccaaaaatgtactcgatcccatggaccttatacaaggcctccaccgcatccttggcaagatcgtactgcaagatgacattggcggggtgaaaggcaggggctccccggggctcccacacactcccccaccctcaccagctggtgagaagcatggatttagcagtcctggaagttgaaggtggagatggcccttgtgagaagggagcacagcatttccagctttgaacttgatcacacgtgagaacagcaagctccccctaccccacccccgcaccatggggtcaatcagcccagacccctgcattcagagtaacaacctgagccctctgggagtatgacagatatggattttcctgtgaagcggtctcttctccccaggccctaagcagccagtctcaccaactccctctgatttgaaacgggctccagcaatcggccgtaagggtacataagcatctgagagtagctgtggatggagatcagagccttgaagttgccatgggctgtgatgaagttcactatggcagccacctccggctccgactgaggggagggcccgtgataagtttctgagcaggggttgctgttagaaccatttcctggaagtaaaataaagccaccc

SEQ ID NO: 2217 - DNA, 2925 bp, Homo sapiens
gacacgtggtgccttcaggctctggggcctaggacctttgtggtagcagagtcactgcagagaaccagacaataccaggttgcttataaaaggatgccatgtgcttgctggaggtcccaggtgcaaccaaattgcttgcagctaggaggaccttgaagagaaatgggatcagcccgccaaaccaagaagggttagcacttttgctaggagagctgaccacgcacaaacagatgagaaccaaaaccgagtgaagaggattgaagatgaacccacattttaaaagttcttgtctgctggaggtggcattacctgtgacctcgcttcacttctccatacatggctgttatagcagaaaatccagctttctgaagcatatttcacgacatatgatgagacttatgtgatgtgagacctgagaaaactatgatagaaagaagcaactcaagttgcaaggatattcctcatgtatcatgcaaggatattcctcatatatcatgctttttctatcttctgctctttgccacctgtgaggtccctgaaaatgaaggccaatactacccagatttgaatattctaagagatttctcaaaaagctgatattcataatttgagaagcaatcaagaacaaacgtgtactgaaacagttggtgcaaaatccttattgaccacagatggaattcagtaatttatatttcttcgaaacatagaaaaacggaatactgagatctggtggggggccggcggcagtctgggagcggcgcgccatgtacaccatcatcaacgggcccagcaagttggtcgcgcagcgccgcacaggtctcacgcagcagcaggtgaagggccagctccaggagctcctgaaaagccggcagcccgcgccgccgaccttgcagccccagcgggcgcagcccttcgcgcagccgctgggaccctggcccctgtcgagtgcagggccaaggcttgtgttcaatcgtgtgaatcgccggcgggacccctccaagtccccatccctccaggggacccaggagacctacacactggcccacaaggagaatgtccgctttgtgtccgaagcctggcagcagagactaaggtgtcagtatgttcttcaagctgctctgctcctgggcccaagctattctcctgcctcagccttccaagaagctgaaactacaagaacacaagactgtacctggcttgcaaacaccattgctaataagaagatattacatggatccctgaggtcggtccccaatacgacaagacaatttgatatcataatagaacactgcagaaacaatgctgagtgaagaagagtagaaatgggaagacttggttgagcggaaactgagttcttgaaaagaggagatgcttgatgagggcatggatccctgaggtctgccccagtactataagacaatttgatgtaagaaaacacagcagatataatactgagtgaagaagagtataaatgagaagattggttgtgcggatactgagttcatgaaagaggagatgattgatgaggccaggtgcggtgactcatgcctgtaatccctgcactttgggaggctgcggcgggcggatcacctgaggtcaggagttcgagaccagcctgggagacagagcatggaaacctaaggtctgtacccaaaactacaggactatttgacatcataataaaacactgcagatatgatgctgagtaagagtagaaatgggaagacttggttgtgcagtaactgagttcttgaaaagaggagatgcttgatgagggcatggatcactaaggtctgttcccaatacaagaagactctttgacatcataataaaatactgcagatacgatgctgagtgaaaaagagtagaaatgggaagacttggttgtgcagaaactgagttcttaaagagaggagatactttatgagggctggagtgcactggagcaatcctggctggccaatactgagttcttgaaaacaggagatgcttgatgaggatgggatcatctagttgcaggaaaacaaggctcagggtgcctactgattctacattatgcttggtccggagagctgccttggactctccaatgcagctgcctctgttaccttgactcgtctcagatttcattgacccaagatgggtcctggcactaggaatgtaagactgtctccattcttttggcttgttccagagaagcccatgcaaggttcctactgaccatatgtttctttcttttcttttgttttttgagacggagtttcgctgttgttgcccaggctggagtgcaatggcgcgatctccgctcactgcaacatccgcctcccggactcaagcgattctcctgcctcagcctcccgagtagctgggattacaggcatgcgccaccacgcccggctaattttgtatttctagtagagttagagtttctccatattggtcaggctggtttcgaactcctggcctcaggtgatctgccctccttggcctcccaaagcgctgggattataggcgtgagccaccgcccccggccttgaccatatgttttatttctagctttgatgtctgggcatcgatttccctcggttaaactatttgctcaatgttaaggccactctgtagaaatttgtctgtgtaactgaggtgctatgcaggcctgcctgtgtgactgtcatgcaggcctgtctgtgtgattgtcagggagaattggtctgccacaatccttttctaagcatagccaatagaggtagttaggcataatttgtatattacagaaattgccttacagagagtaacacatttctatactctccttccataacagacacttaaaaaaacaaaaaaagtaatgtatgcttgctgtggacctcatttaagattgcaacagaagcacttttcaatactattaaacagctttttactttc

SEQ ID NO: 2218 - DNA, 2599 bp, Homo sapiens
agcactggaggaggctggtggggcagggcgggggcggtggggcctcccctagccttccctccccctctccttcactgtccttccagcaggcacaggaaggtgaggcaaggtgtttccagccggcaggatggaggacgaggaaggccctgagtatggcaaacctgactttgtgcttttggaccaagtgaccatggaggacttcatgaggaacctgcagctcaggttcgagaagggccgcatctacacctacatcggtgaggtgctggtgtccgtgaacccctaccaggagctgcccctgtatgggcctgaggccatcgccaggtaccagggccgtgagctctatgagcggccaccccatctctatgctgtggccaacgccgcctacaaggcaatgaagcaccggtccagggacacctgcatcgtcatctcaggggagagtggggcagggaagacagaagccagtaagcacatcatgcagtacatcgctgctgtcaccaatccaagccagagggctgaggtggagagggtcaaggacgtgctgctcaagtccacctgtgtgctggaggcctttggcaatgcccgcaccaaccgcaatcacaactccagccgctttggcaagtacatggacatcaactttgacttcaagggggacccgatcggaggacacatccacagctacctactggagaaggtgggcagtctcgggtcctcaagcagcacgtgggtgaaagaaacttccacgccttctaccaattgctgagaggcagtgaggacaagcagctgcatgaactgcacttggagagaaaccctgctgtatacaatttcacacaccagggagcaggactcaacatgactgtgcacagtgccttggacagtgatgagcagagccaccaggcagtgaccgaggccatgagggtcatcggcttcagtcctgaagaggtggagtctgtgcatcgcatcctggctgccatattgcacctgggaaacatcgagtttgtggagacggaggagggtgggctgcagaaggagggcctggcagtggccgaggaggcactggtggaccatgtggctgagctgacggccacaccccgggacctcgtgctccgctccctgctggctcgcacagttgcctcgggaggcagggaactcatagagaagggccacactgcagctgaggccagctatgcccgggatgcctgtgccaaggcagtgtaccagcggctgtctgagtgggtggtgaacaggatcaacagtgtcatggaaccccggggccgggatcctcggcgtgatggcaaggacacagtcattggcgtgctggacatctatggcttcgaggtgtttcccgtcaacagtttcgagcagttctgcatcaactactgcaatgagaagctgcagcagctattcatccagctcatcctgaagcaggaacaggaagagtacgagcgcgagggcatcacctggcagagcgttgagtatttcaacaacgccaccattgtggatctggtggagcggccccaccgtggcatcctggccgtgctggacgaggcctgcagctctgctggcaccatcactgaccgaatcttcctgcagaccctggacacgcaccaccgccatcacctacactacaccagccgccagctctgccccacagacaagaccatggagtttggccgagacttccggatcaagcactatgcaggggacgtcacgtaagggccccctcccacccacatccctggctttcccacaggcaccatggcatgtgtcatggggcaggagcgcttcaggggagtggctcggagacaggtgttatggccacttctgccacccccacccctttaagacactgaaacatgccggacagcagattcacaagcgaagagcaggaaacagggtttgaggatagtggttaaccatggctgcattcttctgggagcctttaaaaaatacccacgtctcatgtctgggcccaaccctataccagcatctgtggggtggggggcttcaggctggtgatgtgggggtggggagggagtggaaggtgcaggggggccaagattctgcatttctaacaagctcccaggtgaggcctcgctaccatacttggaccacgctcccagtgccaaagcccaggtgtcttcaggggttgtcatgatggctattaacttatgtgttgcttgccgcatcccaaaacgatttaaggtgactcacatcgaagtgtaagtgtttcatgagaacttctcaaggagagggaatagaatagatgatgacaacaaagcagcccaatatcatctacctttatctgttcgcaaaatctacacccatgaggtcgctcatgcctgtaaccccagcactttgggaggccaaagtgggtggatcacctgaggccaagagttcgagaccagcctggccaacatggcaaaacctcatctgtactaaaaatataaaaattatccgggcacgatgacgcgtgcctgtaatgccagttgctcgggaggctgaggcacaagaactgcttgaacctgggaggtagaggttgtggcgaactgagatcgcaccactgcactccagcctgggcaagagagtgagactatttctc

SEQ ID NO: 2219 - DNA, 1613 bp, Homo sapiens
gtagagtgtgatggttcaaaaagaaaaggaaacgcttaaaggtagtgaatcacgttttgcccaggaaaacacacttgataactgaaggatgatgaagtgtccacaggctttactagctatcttttggcttctactgagctgggtgagcagtgaagacaaggtggtacaaagccctctatctctggttgtccacgagggagacactgtaactctcaattgcagttatgaagtgactaactttcgaagcctactatggtacaagcaggaaaagaaagctcccacatttctatttatgctaacttcaagtggaattgaaaagaagtcaggaagactaagtagcatattagataagaaagaacttttcagcatcctgaacatcacagccacccagaccggagactcggccgtctacctctgtgctgtggaggcacagtgctccctagtcacctgcagcctgtactcaaattctacagctgaggctctgcaactgtaagatggggaacttgctacattgagcaagccctcaaaaataaactatacggaaaagcagttattggtcaaaatccttgtgcctatgttgacaattacttttgcagtttactgaatcctaactcagagtcatatcgctgcattcactactttctctgtgagttttctatgggattcagcatagctaatatttctagagggtcactcaggatactaactccattgccacaccattatgctctgtggtagaaagcaagcccttttatcaggattgtacaggcaactgatatgtgcactacacattagggaatctgcctaacagctatggatgttttagcttctttcccaggacaggcacatttataggtaaagttctgcctataacatttttttctggacctactagcaaagaacaaagggtaggaacaagcaggtatcattacctgattaaaacaaaaggttttcattctcagttgcattattcttacttactatcttcattttaggattgttgcctatgctaggtacttcattaaagtggtgatagaatttttcaagatattacacattaatttgtgtacttagaaccttaagcagcctacgaaaagaaaggagttagttgaagcaagttatgtgaagctaacataaacttagcctacttatgttgtgatacactctttcaatgaattatgtaatcatatgtatggtatttacaaagagcttgcaatggaagctaccatttattgaaagcaagtattatgtaccttgtattttgcaaatatcatctcattgaattctcaaaatcactttgataaatcatcaatattactttctgttaacatattaggaaatgcagactcagaaagattaagcccccttccccacctcctaccccagacaaataactataacagaatctgaaatcaggtctatgactccaaactatactttgtctattacatgccccgatgttaaacatcactgaggagaaaatttacccacagtgtgaccacaattatgtgtaaaaaatgtacacaaaatacgaaaataatgtgtttaacatgtaaataaaataacatttgcaataatatgtgaataaaataactccaaaagtttgcaacagt

SEQ ID NO: 2220 - DNA, 2209 bp, Homo sapiens
cttcgcctcgggcccgccctcggcccggacccatgcagcttgggcccgcatcatcgcttgttcggttttcttctgttttcatagccagccagaacaatgttctacgcacattttgttctcagtaaaagagggcctctggccaaaatttggctagcggcccattgggataagaagctaaccaaagcccatgtgttcgagtgtaatttagagagcagcgtggagagtatcatctcaccaaaggtgaaaatggcattacggacatcaggacatctcttactgggagtagttcgaatctatcacaggaaagccaaataccttcttgcagactgtaatgaagcattcattaagataaagatggcttttcggccaggtgtggttgacctgcctgaggaaaatcaggaagaaagaagatggaacaaaaggactcagcagatgcttcatggtcttcagcgcgctcttgctaaaactggagctgaatctatcagtttgcttgagttatgtcgaaatacgaacagaaaacaagctgccgcaaagttctacagcttcttggttcttaaaaagcagcaagctattgagctgacacaggaagaaccgtacagtgacatcatcgcaacacctggaccaaggttccatattatataaggagctagaagcattatagctagtgtttgattcactagtgcttacaaattgcccccatgtgtaggggacacagaaccctttgagaaaacttagatttttgtctgtacaaagtctttgcctttttccttcttcatttttttccagtacattaaatttgtcaatttcatctttgagggaaactgattagatgggttgtgtttgtgttctgatggagaaaacagcaccccaaggactcagaagatgattttaacagttcagaacagatgtgtgcaatattggtgcatgtaataatgttgagtggcagtcaaaagtcatgatttttatcttagttcttcattactgcattgaaaaggaaaacctgtctgagaaaatgcctgacagtttaatttaaaactatggtgtaagtctttgacaagaaaaaaaaacaaacaaacacttctttccatcagtaacactggcaatcttcctgttaaccactctccttagggatggtatctgaaacaacaatggtcaccctcttgagattcgttttaagtgtaattccataatgagcagaggtgtacgcgaaattgtgttatgactgatagccttcagctacaaaaagataggactgacctggtttaaagtgttctattttgtaaatcattccatttgagtctttctgatgaacttggctatactgaaatctgttattttagtgaggctccaaaatgagcaaagctaggcctgattagagtagagtgactattaaaaaacataactttctaggagctataaatcaaagttttaaaaagatgtttggatatatttgagtattccgatcatgaaaacagaaattgccctgcctactacaaggacagactgatgggaaattatgcacctggtcaacttagcttttaagcagacgatgctgtaaaaactaacggcttctctgatatttattgtaagttttagtactgatctccttttccagtgctgcacactcctggtttggaactttaatagcgttgcaacgaaatcctatatccagtttcctgtaatttaattgaagaaaaatacatccaaataaagactttattattaacagaccagatagcatcagaaatcatgtgactgttatgattatcagaatatgtcttaactttttagggcaaagttaacactgaaagttctagcttaagtgttgaaacttttgtgggaaaaaaaaatcacttttgaaactcagacttcagtgtatacccaataatttaaaattatgtgaaatgttttaaatttgtgaactcgtaattactgttttaatgattcagtttcttcagagtggtaattgtataaaattgctattgcagctttatattcaatatgatgtgcctgtaaaccaaggagttttccccgtttgtaaaaagacattgtagataattgaatgtttgattttagaaaggtcattagtttcttgttacacattttgttagtctggtttttgttgcttatcgggtttaatattgttcttgaaaatagttgatgctatgttatgtataacttttctaataaaagttgtgttataagctgt

SEQ ID NO: 2221 - DNA, 1956 bp, Homo sapiens
attgttatcaactctttgatatctgatgatcaatgctccaaagaattggattaatatttttacacaatattgttgtagtcagtaactgtttctatttccaggcatttttagatgaattcactaactggtcaagaataaatcccaacaaggccaggattcccatggcaggagatacccaaggtgtggtcgggactgtctctaagccttgtttcacagcatatgaaatgaaaatcggtgcaattacttttcaggttgctactggagatatagccactgaacaggtagatgttattgtaaactcaacagcaaggacatttaatcggaaatcaggtgtgtcaagagctattttagaaggtgctggacaagctgtggaaagtgaatgtgctgtactagctgcacagcctcacagagattttataattacaccaggtggatgcttaaagtgcaaaataataattcatgttcctgggggaaaagatgtcaggaaaacggtcaccagtgttctagaagagtgtgaacagaggaagtacacatcggtttcccttccagccattggaacaggaaatgccggaaaaaaccctatcacagttgctgataacataatcgatgctattgtagacttctcatcacaacattccaccccatcattaaaaacagttaaagttgtcatttttcaacctgagctgctaaatatattctacgacagcatgaaaaaaagagacctctctgcatcactgaactttcagtccacattctccatgactacatgtaatcttcctgaacactggactgacatgaatcatcagctgttttgcatggtccagctagagccaggacaatcagaatataataccataaaggacaagttcacccgaacttgttcttcctacgcaatagagaagattgagaggatacagaatgcatttctctggcagagctaccaggtaaagaaaaggcaaatggatatcaagaatgaccataagaataatgagagactcctcttccatgggacagatgcagactcagtgccatatgtcaatcagcacggctttaatagaagttgtgctgggaaaaatgctgtatcctatggaaaaggaacctattttgctgtggatgccagttattctgccaaggacacctactccaagccagacagcaatgggagaaagcacatgtacgttgtgcgagtacttactggagtcttcacaaagggacgtgcaggattagtcacccctccacccaagaatcctcacaatcccacagatctctttgactcagtgacaaacaatacacgatctccaaagctatttgtggtattctttgataatcaggcttacccagaatatctcataactttcacggcttaaaaatatttttatcatcaaagagatgatttaagtcatctgtaagaacaacatgcaatctttgtctttgcttctggcctgtgtaagcagatgaaagtttcccttttaggtgccaaaatgctgaaaattacctttttaaagtgctctattgctgcgatttgtagcatacctttttttctcagcaaattgatgggtggaagctgagaaatgtatggtaaatgtcacagagctacaaccattcacagacaccaaatctctaggagaataaaaagcacattattctttttctatcagaaaaaaacaagatgcatcaccttaaaaccaagatgacattgttcttcttggaacatgttaagacatcgaatggtggcgggttaaactgtactgcttaagtggagcggctaccgttatgcatctatcacagttggggattttgccttattaaggaaaacttgtcaatagttcagctgaaatgactgaatcacagaatattaactctgttatggaacaaatcataacagattttacctgtttacatttcaggtaaaaatgtatcgcattgttatctaatattaaaaaattacccccaatt

SEQ ID NO: 2222 - DNA, 2836 bp, Homo sapiens
gttttagggaggtaggagccaaacaaacctggcgcccgcttccaggctgtggcatgccaggcgagtcaccggcatcctgtccctgcccaccgctttaagaaactgttagttctgtttgaaatgtcatcactgggcgtgaattcccatcttcagataatcccgccaggcggtgtttggatgaggagtttattcaggctgtgggggtctgtgcgtgcccgcgggtccctcccactgcagccggcgaggctggccctgacccagagtcgcccgcccacccagtctacgtaggcattagaggtttgggttctgagctcagggcctggtttccatggcaaatttctctcccttcggcgaggctgctgccggcggggttcagctccccagaagggagatggcagcaaatctgcgggaggagagtcttcgttatctttgcttaaaaattgggcagcgcatggcttcctcccctccgcactcgccagcagcaggggacaggagcgctggctgccttctgatgaaacggggcgggcgcaggacggggccgatgacagcgatgctaatggccctcattcagcagcctcccgccgagggctcgggccgcttgttctccctgacctgattgcgagccaagcagacttaacccgtgtgtgagccaaaccctcccggagctccagagcccagcccgggtccccgaggcccagggagggacccagcatcctgcggcctctgcccgtggtgggcacaggctgaggcttaggtcataggaacaggagcgcgtagcctcatggccatcggcctgtgtgtgagacagttcaactcccgtgctctccaaagctagtcccatcattacacgcgccatttaggacgctccaggccatctcggtcaccaggggcctggcggtcaccgtgtttcctcatgaggctcagtgggtgctgtgtgtctgtgggtgccggtgatgaaataaatgtaaggcatcagagcattttaatagatgggaacctccacagcctgcaggtatccagacgacgttctgcacacagagactcagactcccaccagggcctcacgccccactgcctctccgggatgcctgcgtgtggctcactcccgccacgggcacatcagccctggtgcccagctggccttctgcagagcctggtgctggagcagcttctcgaattctctgctgcctcctccccacagccttccagggcctcagagctgctgccaggccagcacctccttgggcccgtgttgaggccccacggggctgggctcatgtgggagctgatcttggccgggtgatccctcactgctctggacaaaagggagccatgggccgggcatggtggctcacgcctgtaatcccagcactttgggaggccaaggtgggcggatcacctgaggtcggagtttgagaccagcctggctaatgtggtgaaaccccgtctctattaaaaatacaaaaattagccgggtgttgtggtgggtgcctgtagtcccagctactcgggaggctgagacaggagaatggcgtgaacccgggaggtggaggttgcagtgagccaagattgtcccatccagcctgggtgacggaggaagactctgtctccaaaaaaaaaaaaaaaaaaaaaaaaaaaggagccatgattgttctccagctgcagtccctgtctcttcagaccctctgtgctcttaggagactgtcgttgttctctcctttttaaaccatcctgtgccttttaacagaataaacggcaaggggtccccactgaggtcgaataatgctggaggagggccgtgggtccaggcatagtgggggctgcctcctggttgttgatgagcagaaattcaggccggtttgacggcaggcacgtgagggaggttgctgtgtgtcagtggccctgtgtccctggcactgtgtccgaacctgacagccgccgctgtgtcactgggcacctgccctgcgcaccctcccctgtgacgggcactctcacagctttcctggcgaggctgagggaaaaacatggcaaacaactcgcacatgactttgcgtttttggccttgtcatataataaaagtaatttgtgggcctaaaataaatcagggctggggatcagatgcctccaatctggcctttaattgcaggcgtgacatggcttgcctcggcgagtctgctcctaattaaagtgggctggcggtgtatgaagttcgcatggatcctcagggtgctgacccagccccggttccggagggccagtgtgacgacacctcgtggcccaggagagcagggcgggccacccatggccaccgtgccaggaatggggtcttctggctggccctgcgagagccgagagctctgtctcctccgcctgctgctccgctttgtcgggcattcctgtgggcggctctccccatcccaggctccccatcttccctgagccgaggctcccaggactctgctggtctcctgtgtgtctcaataaaaggtcattatttgaaatcattgacaccactggtttaagataccaaattccatcatctcttgtcccgtaaaacgatccatgaaagaagatttttccagtagaaacaggcaggttggctcatgcctgtaattccagagctttgggcagctgaggccagaggattgcttgagccagccactggagctcgagaacagcctgggcaacattgcaagactccatctctacaaaaaaagaagaaaaaatcagctgggtgtagggcgcacacctgtcatcttttagctacatgggaggctgaggagggagtattgcttgagcctgggaatttgaggctgcagcaaagaccctgtctctt

SEQ ID NO: 2223 - DNA, 1934 bp, Homo sapiens
aaaggtcctcctgggggagaacagagtcccgaacaccatggccgtctggcttgcccagtggctgggccctctgctcttggtttccctctggggactcttggctccagcctcccttcttaggcgcctgggtgagcacattcagcagtttcaggagagctctgcccagggcctgggcctgagcctggggccaggtgctgcagcccccccaaaagtggggtggctggagcaactgctggaccccgtcaacgtgtccgacagacgatccttcctacagattgtcttgcacagcctgggccagaagtgtttaagcttttcccgagcagagacagtggcacagctgaggagcacagaacctcaactgtctggtgtgggtgaccggcagtggttgtatcagacatgtaccgagttcggcttctatgtcacctgtgagaatcccagatgtcctttctcccagctcccagcactgccctcccagctagacctatgtgagcaggtgtttgggctctcagccttgtcagtagcccaggctgtggctcagacgaactcctactacggtggccagacccctggggctaacaaagtgctgtttgttaatggggacacagacccctggcatgtgctaagtgtaacacaggctttaggatcctcagaatcaactcttcttatccgcactggctcccactgcttggacatggcacctgagaggccctcagactcccccagcctccgcctagggcgccagaacatcttccagcagctacagacctggctcaagctggcaaagggtgaagtctgaatctcataccctttccactccctgcatggtcacctcagtcctggacatacttgttcactgaacaaaagaaagcagcttgttttgaaagaagaaactcccaggaattggaattcagcacctgttccgcacgtaattggcatgtgtctgcaaacatccttattcccaacttaaagtgctttattgcagagagttatggaaatataagtggatgattattctcattgtaaatattggtattttgaatgttaaatgtcaaacaaatgtgacttatgctggtgccctcgccctgctgatcagattctggttcaaattctgccgctccagctcctgggttaggggctttgctgtaagtttctttttctggactttagatcctgaacctgtccttgcttctcagtttctctcactgtacccctttccctcagtctcttcctctctctttcccctgtcactatttgtctttctaatctccttctgtttctctgaatatcttcatttctatctctgtgtttctgtctatttctctgtttatctttctgtccttcaatctgtgtttttgtttctggctctccgtcagtgtctttttctctcctctctctcttgctctgccatggctatttccactgctctatttctgactctcatttttggtctctgtgtgtctcctagtcactttctttctcactctgtctctgtctctatttctgtctctcctctgctgtgtcctcaatctctctgtctccctgaggctctatttctgtctctcctctgctgtgtcctcaatctctctgtctccctgaggctctatttctgtctctgatgctcttcttctgtgtctctatttctcttcctgtcacttaatcttttccttctctatctctcttatttagtcttccttccacacccttcactcaccatcttttcccacaatcaaatatcactccctggtacttccagcttccaactctagggattcatgattctggtggagattccttcttccagggcctgggaggatagggctaatcccaagggtgcctgcttaggctatgttagctgtgacaggaacctgccatagatttgcactgttctttcctaaagatcaattattttcagcaataaatacttctcagctttt

SEQ ID NO: 2224 - DNA, 1987 bp, Homo sapiens
agagaactcagaaataagaccgcacatctacaaccatctgatctttgacaaacctgacaaaaacaagcaatggggaagtgattccctatttaataaatgatgctgggagaactggcgagccatgtgcagaaaattgaaactggaccccttccttacaccttatacaaaaattaactcaagatggattaaagacttcaatgtaagacccaaaactataaaaaccctagaagaaaatgtaggcaataccattcaggacataggcataagcaaagatatcattataaaaatgtcaaaagcaaatgcaacaaatgcaaaaattgacaaatgggatccaattaaactaaagagcttctgcacagccaaagaaactatcatcagagtgaacagacaacctacagaatgggagaaaatttttgcaatctctccatctgacaaaagtctaatatccagaatctacaaggaacttaaatttacaagaaaagaaaaactcattaaaaagtgagcaaaggatataaacagacagttctcaaaagaagacatttatgtggccaacaaacataggaagaaaagctcaacatcactgatcactagagaaatgcaagtcaaaaccacaatgacataccatctcatgctaatcagagtggcaagtattaaaaagtcaaacaacagatgctggcgaggctgtggagaaataggaatgcttttaaactattggtaggaatgtaaattagttcaaccattatggaatacagtgtagcaattcctcaaatacctagagccagaaataccatttgacccagcaatcccattactaggtatatacccaaaggaatataaatcattctgttataaagatacaggtacacatatgttcgctgaagctctaggcacaatagcaaagacgtagaatcaacccaaatgcccatcagtgatagactggatcaagaaaatgtggaatatatacaccatggaatactatgcacccataaaaaggaatgagatcatgtccttagcagggacatggatggagctggaagcgattatcctcagcaaactaattcgggaacagaaaacaaagcaccacatgttctcagttataagtgggacctgaacaatgagaacacatggacacagggaggggaacaacacacactatggcctgtcgaggggtggggggtaggaggaggcagagcatcaggaaaaatagctaatgcatgccgggcctaatacttaggtcaggggttgttaggtgcagcaaaccaccatggcacacgtctgtgtaacaaacctgcacatcctgcacatgtatcccagaacttagaataaaaaagaaaaaacaaaacaacaacaaaaaaaaaactcctcgtgatgttacttgcacattgagccaattctcaatcactcagggccttatgatgcaaacccacaagagataggtccatttccccttcctcttcatagcctttgccctctgagaggctcccaggtgtactcctcaaggagatggggaaatgaagggtcattttgttatctgtggtgctttgtattctctctgtgttgaaggggtttaattacaaaaaattggcagagattaaaacagaaaaagagacagagaaacttgcggaataggaggaacacaacagggagagagagatggaagggcaggtaacatggggttggggaacaccaagaaacaaagagggacagacctcaaggcagagaagaaggatgtttgagagataggggacactgagaaaggagggtgatattcagagagggaacaacacacactatggcctgtcgaggggtggggggtaggaggaggcagagcatcaggaaaaatagctaatgcatgccgggcctaatacttaggtcaggggttgttaggtgcagcaaaccaccatggcacacgtctgtgtaacaaacctgcacatcctgcacatgtatcccagaacttagaataaaaaagaaaaaacaaaacaacaac

SEQ ID NO: 2225 - DNA, 2005 bp, Homo sapiens
acctgcagtaacagctgttcatctgttgggacccttatcttaactcaccactttcagaagagcagacaaactcaattttgtacttacggagtttcgctcttattgcccagactagagtgcgatggtgcgatctcggctcactacaacctccgcctcccaggttcaagtgattctcctgcctcagcctcctgaatatctgggattacaggtgcccgctaccatgcctgggtaatttttgtattttttagtagagatggggtttcaccatattggtgaggctggtctcgaactcctgaccttgttatccgcccgcctcgcctccctaagtgctgggattacaggcatgagccactgcgcccggcctccaaagcctaatgtctttgatcttatcaatgttcaatcctggagcctagtgtgtcttggacctgcgttttaccttttgaatcagtaggagcagaactctgttcccaggcaccacaagaatacgtaagactagaaagttgtttctgcttttttcttttttttttttcttttttttttttttttttttgagacggagtctcgctctgtcacccaggctggagtgtgcagtggcgcggtgcgggctcactgcaagctccggctcccgggttcacgccgttctcctgcctcagcctccccagtagctgggactacaggcgcccgccaccacgcctggctaattttttttttttttttttttttgtatttttagtagagatggggtttcaccgtgttagccaggatggtcttgatctcttgacctcgtgatccgcccgcctcggcctcccaaaatgctgggattacaggcgtgagccaccgcgcccggcctgtttctgctttttagcctcaccctattctcagtaaaatgggaatgggacgccagaaagcatttctgagttaagtatattattgctgcatttgggagtcttctagactccagtgtccctgcctggccaccaaagtgccaacagctcatctatctcagtctttggcaggctttcttctctgcctttgcctccacaaactgccagtgcttaacggtcactcacaaagggctcccctctctgaaaattagtccttctggacttttcttgcaactaccattcttcagtagtttcataaatgagtaagagttttataacatctgaggggtgggggtttttttatgttaccataggagcaaatgtgttccacatcctttcacacgctacacagaaaattgtatgttgtgtttaaatcatagccaaattgcaaagaaaattatggtttctttattttgttcataactgatctaatctttctcataattatctccttctaggttgaaaggattataaaatgtaattatgtttaaaattccatgtgatctaaaattccatcattctatcatgagcccaggagctcctgctacataaaacatatgctaatcaataaatgtgatacatcacatcaacagaataaaaaacaaaaaaaaacatatgatcatctccatagatgcagaaaaagcatttgataaaattcaatatcccttcataataaatactggcaacaaattaggcatagaaggaacatatttccacataacaaaggccatatatgacaaacccacagctaacattatactgaatggggagaagctgaatgcctttcttccaagaactggaacaaaacaaatatgctctctttcaccactcttattcaacacagtgctagaagttctgtctaaagcaatcaggcaagagaaagaaataaaggttttccgaattagaaaagaggaagtctaattgccccctctttgaagattacgtgatcttatatctagaaaaatgtagagactccaccaaaaactctcagaactgatcaacacagtaaagttgcaagatacaaaatcagtcaacatgcaaaagtcagaagcatttctatacaccaacaacaaggtagctgaaaaagaaatcaagaaagcaatcccatttataatagctac

SEQ ID NO: 2226 - DNA, 2850 bp, Homo sapiens
cttgtcacttacatgctccaagaggtctcagaactaggggacttcctcccctccctcctccttgtctggagctggcattaggccccacatcttccagacccaagaagggcatttactccaggagatggctgggcagaccctcagtaggtattccacgaaagtgttcatggcttaaacccaacacttgatttctccctgagccagtctctgtgaatgtcctcaccatcgtcctgtgtcactcctggcctcctgctaacaaccaaatctattgactctccagatccccaatgtctccatgtcacactacttccattgccaccattcctgtctgtatccttgtcttaggtccaccagatgaccggctggcctcctaattgggcttcctgcattcctgcctgtgctcggagctcccttctccacttgcctgctggaggaggtttacaaacaaaatcagatcatggcactcccctggggccctgcatcctgtggccagcaggtagggcttctgcgacctggccctggccacctttggcctcccgtcctcccattccttccaggccccactgtgccttggtgtccctgccctcctttctcctccccaacttcacccaccagttcccatctcccttcctttgcagggtgtttctgctgctggaattctttgcccctgggtctccgtgtggttagctccctttcaccacgctcagtcaaggtctaatattgtccccccaccacctcctgcattcactctccgtcccattaccctgttttactttcttcagagcactacgttgttttgttgtcctctccactaccctaaatagaatgtaagctccaagatgcgagggcatttcctgtcccatacattctgcatcccagagcctgggctggagctgagaaggtgctcaaggaatgtttgtcgcatgagccaatttcatagtgctccaggctcccaggtggaaaggtccttggtcttttctttaccaggtcttggaaacgctcctgtaccccagaaacttcctgatcagtccctggtcagtgtatatcatgcttcctgtgacatgacatcaacttttcagtgacttccactggttttggcccagctcgaagagcctgacgcctctgcagggaattctaccaggagaagagaaagtagtcactgcttccagtttttttaaggagttggccaagagccagcaccaggcatcagaggaaggcagctgactgcactcggccacatcccaaaagtgcctggaaggggagggaggaagcaggcgcttcagaaggcactactgtgtgtcaggactcatgctaggaacgctgtaacagggagcagtgatggagtccttgagggagctcaggagggggaattgcactgaagatttgtcccatcgtgaagcaagagcactggaacttacactccaccatcaggccctgtcacaggagaacaaagaaggaaggcagaggagatcatgctccggccagcagggaatctccatttttttcagcctcataccttggaaagtacaaaggagtgagagctgggactaccagccagagggttcatggaggtagtgggaggggaagatgggttctgcatggagccactccagggacttttcttctgtctcacagcctgacaatcacctctagctgttctcagtcccattctcatcaatgacctcgtctcctgattttgtacaatatctaggtgaccttctcttctttccatcttcaaacgcttgatcattgatgctcccttttctcttctctctcctcctgggaaaagagaaggaccaacatccccctttcccttcctcctgtgctgtcccgacccctctgagacctggctctagcagtaagtccctctctcttctgcagcaccagcctctgcccatccctgccctctgcacacaaagctctcacattgtctgcactttaagaacttttgtggcaaaccctggcaaatcctgccacttgtttccacttttctcaaatggctttgaggtcatcattgacctatcccatttgaccctgtcctgtatctgatgttgtaccctttctccttgatcccactctggcaactctcccactcccctttcttggatcaactgtcttgctcctcagtcttgatcaatccctccttctctctctttagccttggccctttttggccagggaaataaatgtgaaatacataaagcttcattttatcttatgattatagctatgttgatgttacccaagacctaaaagtcacactctctaattacacttccctcctgtgttctgggtcctcttggaccagtccttactctggctcccctcctggatgtctcccagacttctaattagaattactgtttcctatatcaagctaattatctttcccaccaacctcctccatccttgggtgaaagcatcacttggttgcaaaagtcagaaatctgggtttcattcttgcggtaggtagaataatgcccccaggccccaggttttgacatccgaatccctgggactttgcagatgtgattcagtttaggattttgagatggggagattatctgggagagcctgatgtcatcataaggttcttataagagggaggcaggagggttagagtgagtagtaagagatgcaacagtggaagcaagaggttggggtgatgtggccacaagcccaggagtgctgacagacatcagaagctggaagggacaaggaatggtttctcctctggagcctccagaaagaaccagccctgctgacaccttgattttagccttggaagactcattttggacttctgaccttgaacgttgtaagagaataaatttacatattttaaactgg

SEQ ID NO: 2227 - DNA, 2048 bp, Homo sapiens
agcggagcgttgtcggccagtgccttccgtgaagttgctcgccgggtcgttgggccctgtcgacctgtaggcgggcgagcgagccagcggacaagactgcgggtacaaaactcaaaacatgaacaacaatatatattaccaatcttcaaacctggtttgcctagaactggaatacagttgcctgcgacatattttagaagaactagaaaagtcaaagtaatggataacagaaaagagcctccattctttaatgatgataacatgggaccattttactacagacttcatttctgtgataccatggagctcttcattgaaacattaactggaacatgttttgagctgagagtttcaccttttgaaactgttatttctgtgaaagcaaaaattcgaagattggaaggtattcccatctgtcgacaacacttaatttggaataacatggaacttgaaaatgattattgcttgaatgattacaacatttcagaagggtgtaccttgaagctagttttggctatgcgtggcggacctataaatactagaagagatcttcaaatcccaagatgatgatcgttttgcaaaattccaacattgcctgtttacctggtttgtgatgtgtctgggtttcatggatattatcatggccccggttgcatcctttctcagaatataagtagttctgaaatccagtcattcattcaacaaatacgtattgagcgtctactgaatggtcagtgcaatgttccaagtatggtagacatgggagagaaagtctctgcttcatgacagtgcctacaataaatgtgtaaagagtcgatgtaactcctaatggttgtaagtgctatgcagaaaatagggtaggaagggccctcgaaaaagatgacattagtggagacttgattgatgagagggttttattaagcacaagaagagacggcagtattcacattggtccctgagtcaggtatgtcacatgaattcccatgaagtggaggagactagtcagagcatcctcttctgtggacctcattttgaggaagtccttcagatttatttgatccttcactaaccagaaaaccgaaggataagtattgattctactcctggcttgcttccacatgtcaaattatatccctatgtttaataattttggttagaaaataggattattgccatctttttcttagctatttcaagaggatttaatgagatatgctactttggctgttggactgctttttataggttagagaaaaacaaagttaataatgttagggccttttagcactcctgataccagagacttttaattaattggatttaggtaattgtcctatgtgacatttatagtaataactataaatgtttatagtaataactatgtgatgtttatagtaataactcttgaagtagcacaagaaccctgtgtttactgaaccattatgttaagatagaattatatagtgtttaatgccatgtgaactctattgtattacatttttgaaagttggttatttgtgcgtagtactactttaaaccaaagtgtttaatcaaaacacctacttttcttattagaactaaaattattttatatgtttatgaggagtgtgatacagattctgaggtaaatatatatattttttacttttctttttttttttgagacggagtcttgctctgtcaccgaggctggagtgcagtggcatgatctctgctcacttcaacctctgccacctgggttcaagtgattctcctgcctcagcctcccgagtagctgggattacaggcagtggtattgaggtcaggagtttgagaccagcttggccaacatggtgaaaccccatctctactaaaaatacaaaaattagctgggcatggtggcgggctactcgggaggctgagacatgagaattgcttgaacctgggagacagacgttacagtgagtggagactgcgccactacagtccagtctgggtgacagaggttacagtgagtggagactgcgccactgcagtccagtctgggtgacagagtgagactctgtctc

SEQ ID NO: 2228 - DNA, 2480 bp, Homo sapiens
acaaaggcggtggcggcggcagcagcggaggggccctagagcccgctccgctggggctctccgggcccacctccctcacttcggccaccggcgcggccgcccacccgcgggtctaagatggcggcggcaacagagacagggcaagcggcagtcccgagcagaaagcgccggaggggccgccgccccccagcttcggatccccagaccctggcgcggctcgctgcgggaccatggcttcctgggactcttacctgcccggagcggactggaggggacgcggctacacgttctgctcgaccgcccgttttgccgcctccgcctcgccctccccagcgccgctgccgccatcttgtgtcccgggccgggactccgcgctgcgcatgcgctggtaccgcctctgagggacctcgccgcggccgcgccgccatcttgagtgtggcagggtcggctggctcctcgcacccagcttgctttcggccccctccccttcttcccatccgtccctgctgttccttgtggcgctgaggaaggggagacagctttgtaggcctgcgggtggactgaggaaggaatgaattcactggcacgtccccgcctcagtttccccctcgagcacacacgcaggagccggatgttcgcggtgggcggtgcgcggcggggttggactgagcgtgcgcactggggggcgtgggggctgtcttagaacctgcgggggtctcgggttctgccgccggcccaggggaggcatcgtggtgacgtaggctccggacgtagcaaggacctgggtcctggcacccgcgcggctctgcctcttccagccagtctctttccctctctgggcctttgtgctgcgtggtgtccaaatgttaagaagccctgccccatgcccgggctacatatacatcgaacccaagctgtaaatgctcttgagtagaagcaacttaaactagccttcgggggcaagtaatagagatggctttcggcagagttgggaaatcaactaaatgcattgtagggcctttccaacattgacatctgtggccattagttgcagttcaaagcctcactgagccctcaaaccagctacagcgggtagcctggcagggaactggcagctgtgaggtgctcctcatccggctccctgcaggattctttttggtaggagcctgcaggcgtccgagtggtagctccacccatctccggtctccccagcaagcatcccttccagtgctagcttgagaagaggaaaagcttgccacctgctgtcagaccggcgcttgtgtggagccaggggctgtaggtaccccggctgagtagcctctcagatgtccatggtcctggctgcacgccagcgtgggggcaggcaggcggacgctcaagaaaaacggaggcaccgatatgagtagtaattgagaacgagggttcatgatcctcatctgatttcaatccctgctcctccacccaaaatgtgtggccttgaaggagttaaccaatttaaattttagtttcctcagtggaagataataaatccgcctacctcataaaggtttggtgagaattaactcaggtgatgcatgtgaagtcctcagcgcaatacctggcgcttcctaagtgctgaatcggttagccgtgatcatctcacagtggcatgagcattgctccaagtagatttgagccctccagaaataagccagctctatataggcacagcagttctgccctcgcagagcttctcgttcagataagaggcctgatgggaaaccagactcctgggtcctgtctcagttctggaagggtggggggccagctttgatttatgcctgctgccctggcataattactaatattgcctcctttttcagaagtgccctgctttgggccgggcgtggtggctcgccccggtggtcccagcactttggggggccgacgcgggtggaccacctgaggtcgggagttcaagaccagcctggccggcacggcgaagccccgtctctactaaaattacaaacatgagccaggcctggtggcgcgcgcctgtagtcccagctactcgggaggctgaggcaggagaatcacatgatcccgggaggcagaggttgcggtgggtcgagatcgcgccactgcactccagcctgggcgacagagtgagactcctgtctcaaaaaaaagtactgctttgggcagtaaactacgtggtcgctcttgacctacgggataaccagttttccatgctcatgccccccagctagcccgcgctttcactaaagtttaaaaaccatgtagtgattattacccttttttttttttgagacgaaatctcgcactgtcgcccgggctggattgcagtggcgcggtctcggctcactgcaacctctgcctcccgggttcaggcaattctcctgcctcagcctcccaggtggctgggattataggcacccgccactgcactctggcctggtgacagagcaagactccgtctc

SEQ ID NO: 2229 - DNA, 2590 bp, Homo sapiens
gtttcccggggttggtggcagcggcggtagcagcaatggactttctcctggggaacccgttcagctctccagtgggacagcgcatcgagaaagccacagatggctccctgcagagcgaggactgggccctcaacatggagatctgcgacatcatcaacgagacggaggaaggtgactctgctgctggaggtccaggggccacaggttgtgagtccctgctaagcaatgggctaggaagattctgatgtgatcagaacctggctggatacacaaaacagtcccaaagatgccctccgagcagtaaagaagagaatcgtggggaataagaacttccacgaggtgatgctggctctcacagtcttagaaacctgtgtcaagaactgcgggcaccgcttccacgtgctggtggccagccaggacttcgtggagagtgtgctggtgaggaccatcctgcccaagaacaacccacccaccatcgtgcatgacaaagtgctcaacctcatccagtcctgggctgacgcgttccgcagctcgcccgatctgacaggtgtggtcaccatctatgaggacctgcggaggaaaggcctggagttccccatgactgacctggacatgctgtcacccatccacacaccccagaggaccgtgttcaactcagagacacaatcaggacaggattctgtgggcactgactccagccagcaagaggactctggccagcatgctgcccctctgcccgccccgcccatactctccggtgacacgcccatagcaccaaccccggaacagattgggaagctgcgcagtgagctggagatggtgagtgggaacgtgagggtgatgtcggagatgctgacggagctggtgcccacccaggccgagcccgcagacctggagctgctgcaggagctcaaccgcacgtgccgagccatgcagcagcgggtcctggagctcatccctcagatcgccaatgagcagctgacagaggagctgctcatcgtcaatgacaatctcaacaatgtgttcctgcgccatgaacgagacaggggtctcactgtgttgcccaggctggtctcaaactcttggcctcaagcagtcctccctccttggcctccgaaagcattggtattacaggcatgagccaccacacccacctgcccaccttgtatcattctgttcaagagtcacatccccaagagagacttggattggctgagcttcattgtgcctaccagctggggtttgaacggttccgaacaggccagaccaccaaggccccaagtgaggccgagccggcagctgacctgatcgacatgggccctgacccagcagccaccgacaacctctcatcccagctggcaggaatgaacctgggctccagcagtgtgagagctggcctgcagtctctggaggcctctggtcgactggaagatgagtttgacatgtttgcgctgacacggggcagctcactggctgaccaacggaaagaggtaaaatacgaagccccccaagcaacagacggcctggctggagccctggacgcccggcagcagagcactggcgcgatcccagtcacccaggcctgcctcatggaggacatcgagcagtggctgtccactgacgtgggtaatgatgcggaagagcctaagggggtcaccagcgaagaatttgacaaattcctggaagaacgggccaaagccgcggaccgattgcccaacctctccagcccctcagctgaggggcccccgggtcccccatctggcccagcgccccggaagaagacccaggagaaagatgatgacatgctgtttgccttatgagtgtggggtctggcaccctgcagcccaggtccccactgctctcacacccttaggctgggacctccctccctcctctggtgttaaggctgctttgggggtggcttgttacccccttttcctcctctttgaagacggagctgccccagctgtggctgggggtgtggaggcagtgggatgaactgggggacaggtctgcgctgcagtgggatctggctgctctgcctcctttcccaccccagctgaccatgagactttgctgagaagtggaggccccaggacaggctggctggctggctggctgcttgacccagtgtgactctccttcactgagtgataccctgctccgggcccatgccccaaggagcccttcagagcccacactgccagtcgaggcctggctggaggctggccacagtggaaattctgccgagcctcttgtcccttccctgctctgctgcatggggccccatggctttggctggccactgagggtagggtgtggaggtgtggaggccccctgaggagctgcggcggcccaggtacgaagctgcaactctgcgcgcagtgggcgagatctcatcagccccaggctgcaggtgaggcttcaggggatgctggggccccactgcccctccgctgccttgccctccatccttcctctgttccttctggccgggcaccacagcactggggctcacctcttggttgatcctcttgtactgggagaggtgccttttgtatccccaattaaaggtagaaaaccaaaaaag

SEQ ID NO: 2230 - DNA, 2823 bp, Homo sapiens
gtaacgcgtggcagcctgagggaggggcgtgcgccgagagggagctcagatcgagcggggcgcgggtggagaagctgcggcagcgcggcccgtaggaaggtgctgtccgaacgatcgggataggagcggtccctgcgcttgctgctgggaagtggtacaatcatgtttgaaattaagaagatctgttgcatcggtgcaggctatgttggaggacccacatgtagtgtcattgctcatatgtgtcctgaaatcagggtaacggttgttgatgtcaatgaatcaagaatcaatgcgtggaattctcctacacttcctatttatgagccaggactaaaagaagtggtagaatcctgtcgaggaaaaaatctttttttttctaccaatattgatgacgccatcaaagaagctgatcttgtatttatttctgtgctgtccaaccctgagtttctggcagagggaacagccatcaaggacctaaagaacccagacagagtactgattggaggggatgaaactccagagggccagagagctgtgcaggccctgtgtgctgtatatgagcactgggttcccagagaaaagatcctcaccactaatacttggtcttcagagctttccaaactggcagcaaatgcttttcttgcccagagaataagcagcattaactccataagtgctctgtgtgaagcaacaggagctgatgtagaagaggtagcaacagcgattggaatggaccagagaattggaaacaagtttctaaaagccagtgttgggtttggtgggagctgcttccaaaaggatgttctgaatttggtttatctctgtgaggctctgaatttgccagaagtagctcgttattggcagcaggtcatagacatgaatgactaccagaggaggaggtttgcttcccggatcatagatagtctgtttaatacagtaactgataagaagatagctattttgggatttgcattcaaaaaggacactggtgatacaagagaatcttctagtatatatattagcaaatatttgatggatgaaggtgcacatctacatatatatgatccaaaagtacctagggaacaaatagttgtggatctttctcatccaggtgtttcagaggatgaccaagtgtcccggctcgtgaccatttccaaggatccatatgaagcatgtgatggtgcccatgctgttgttatttgcactgagtgggacatgtttaaggaattggattatgaacgcattcataaaaaaatgctaaagccagcctttatcttcgatggacggcgtgtcctggatgggctccacaatgaactacaaaccattggcttccagattgaaacaattggcaaaaaggtgtcttcaaagagaattccatatgctccttctggtgaaattccgaagtttagtcttcaagatccacctaacaagaaacctaaagtgtagagattgccatttttatttgtgatttttttttttttttggtacttcaggatagcaaatatctatctgctattaaatggtaaatgaaccaagtgtttttttttgttttttttttgagacagagtctcactgttgcccaggctggagtgcagtggtgcaatctcggctcactgcaagctctgcttcccaggttcacgccattctcctggctcagcctcccaagtagctgggactacaggcacccgccacagtgcctggctaattttttgtatttttagtagagacagggtttcaccatgtgagccaggatggtctcaatctcctgaccttgtgaaccacccgtctcggcctcccaaagtgctgggattacaggtgtgagccaccacgcctggcccatgaaccaagtgtttttaaggaaacaaaactatttttttaatcatcagatttatactagctatatggatattagcatatctggtaattatgaatctagaatttttttacatatttttataatactgttagctcagttattggatgagtgaaagataatcatgttggttttaatagtgtcaatttttgtaaaataaaaattaaacttcaaactctttactttataaattgtccataggccacactttaatatcacattataaagggaaggacagtcttcattcctcctggttattggtttgtttgtcattaaagatatattttgaatccatgaaattgctatgctaaacagcctttacatgtatggtctggttaaagttcctttgttccttttgttttaataaaatgtgtcactgattttttagctcaaaatcatcactgttaatttccagtcaccccaaatatggttaaaagattttttttttaatcatgaagagaaaattagtagcatttctttctctccccattatttattggttttcctcactaatctttttttttttagtccaaaagccaaaaatatttatcttggttttacattttaatttccattcttaattgtaatttttttctttaaataaggaaaccaatataatctcatgtataaaaacttaaatattttacaagttacatatagcatcattctaaaataagaattttttttgttttctgtctgcttttttcttatgtctcttgttgagttttatattttcagtggttatttttgcttgtgttagatcattattaaaatatatccaatgtccctttgatacttgtgctctgctgagaatgtacagtttgcattaaacatcccaggtctcatccttcaggaattttgcagttcaatgagaagagggagacaaatataaagatgaggacagaagcatctctacagatgaaaattacataaataaaacattctccatc

SEQ ID NO: 2231 - DNA, 2057 bp, Homo sapiens
gatgtcatggcgcgaagcccggcggtgctgccctcctaggccccgggaaggccggccggcaggggcgggggcaggagtcgccgactctgggggtgctccgagctcgtgctgcggtcccacttcctggccccctacacgccaaattatccttaaaaattccagtctccgaattttccaggagactggtttgagtaataataaagcttctatctctctttcaccaagtttttgtaaattaaactcttcattgcaattcccctgtcttgatagatctgctctgtctgcgtatcaggcagggagaagccattgggtggttacacaagtacttatccactttatgtttctataaatttgcctgttccctgttccgattttttttttttttttttttttttttgggacagggcctggctctgtcgcccaggctggagcgcagtggcgcggtcacggctcactgcagcctccgcttcctggcctctggcaatcctcctgcctcagtaccctctacccccttgcccagtggctgtgactgctgcgggtgcaggccaccaagtctggctagtttttatgtattttttgtagagatggggtttcgccttgctgcccaggctggtctcgaactcctgaactcaggtgatcagcccatctgggcctcccaaactgctgggactataggtgtgagccaccgcgcctggcctgaacatttcacataaatgtaaccatacaatatgtggtcttttgtgtctagtttattttatataacttaagggaaagcttcctctttgccctctgaaggatcactgaaaaaacaactgatgaaaggcagattaattggagacaaggcatataaatttatcaacatgcacgcgggggagtactgcagagttaccctaacctcccagtggggtataggagcttacataccatctttttttgttgtttttttgagacggggtctcactctgtcacccaggctggagtgcggtggtgcagtctcggctcactgcaacctccacctcctggattcgagcgatcctcctgcctcagcctcctgagtagctgggactgcaggtgtatgccaccatgcctggctactttttgtggtttttggtggagatatggtgtttcgccctgttggccaggctggtctcaaactgctgacctcgggtgatccgcccgcctccgcctcccaaggtgctgggattacaggcatgagccaccattctcggcccataccatcttgaggttacaaaatgaatggggactcagagcatggccaaaaacagattatagtggtaagcaggttttagtggcaagacaccttatgggagggggaaaagatgaggcctggctagcataagtggtcttgttaggtagatgaaatctcacaggtagcagccctcagaaagaattgatggtaaatacttcttttcgacctttaaaggtgtcagagcctcagttaattgttcctaaatctaaagagaagccccacataagtgaagattttatccactgatgcaaatctctcccaccaaagacagctttgcagggctacttctgtttgcaaggccctttgaacagctgtctcaaaatatgtcaaagaaggatattttaaggtgaaatatttttatttctttcactaacgtgtataaatacttcattccttttttattgccaaataatatgcacggacataggacattttatttataaagtcatcggtgctgggtaaggtgtcagagccccgcgtcgaatagtggttgactcgccgctcgcaatggctcacacctgtagtcccagcactttggggggccaaggcaggtggatcacctgaggtcaggatttccaaagttccagaccagcctggccaacatggtgaaaacccgtctctgctaaacatacaaaaattacccaggtgtggtggtgcgtggctgtagtcccagctactcgggaggcggagacaggagaatcgcttggacccgggaggtggaggttgcagtgggccgaggtcgtgccattgcgctccagcctgggccacaagagtgaaactcagtctc

SEQ ID NO: 2232 - DNA, 2884 bp, Homo sapiens
aactatgagtacgtacagagagaagctctcagggttcccctgatatttcgagaaaaggatggactgggaattaagatgcctgaccctgatttcacagtccgagacgtcaaactcctagtggggagccggcggcttgtggacgtgatggatgtgaacacccagaagggcacggagatgagcatgtcccagtttgtgcgttactacgagacgcccgaggcccagcgggacaagctgtacaacgtcatcagcctagagttcagccacaccaagctggagcacttggtcaagcgtccgactgtggtagacctggtggactgggtggacaacatgtggccccagcatctgaaggagaagcagacagaagccacgaacgccattgcagagatgaagtacccgaaagtgaaaaagtaagactgcctggctggtggccagagctggcagggttgacccccaggcttggggaggtggggaggtgggaaggaggctcctggccatcagtgaaggcttgagcgtcacaaccgctcccgttcagaactgaaggactgtgcctgtgggggcacagctgggacaggagggacggggtccttcgcgtgtgcaggttggctgcaggggctctgatgcctgctctgggaccagctcccctggggatctgtgatctgaggaggagtgatggcagacgcctctgcatcggtgtgtgtgtctgtacgcaagagcacaactgtgcatacttttgtgcactccctccatgagacattgtgtcctgggagtgggcattttcgggggacctgcccacattggatgctttggttttggtgagcaatggggaaatacctacctggcattcttttgttccttggtgttgagaccttgaagctcatacccaaaataacctttcccaaacatagtccaggggccacctgctcacctgatgtaccttagacagtgccctctgagcaggaggctgacactaggtacagaagttaaccatggtttatttttttatttttatttttttctgagacagagtcttgctctgtctcccaggctggagtgcagtggcacgatctctgctgactgcaacctccgcctcctgggttcaagcaattctcttgcctcagcctcccaagtacaggcgtgagtcacggcgcctggccaaccatggtttaatagcaaagacatcacaacatgtggcattaccagcaagtcctgagactgattatttaacatgggctgtagcacctttgagcccctccatgttcaaggacttgagtaacagaacttttgggaggaggaagtcacctttgaggcttccagctctgtttccaactctgaaaggggaaagaggccgggcggggtggctcacacctgtaatcccagcactttgggaggctgaggcgggcagatcacgaggtcaggagttcgagaccagccagaccaacatggcaaaactctgtctctacgaaaaatacaaaaattgacccggtgtggtggtgcacgcctgtaattccagctactcaggaggctgaggcaggataattgcttgaacctgggaggcgaaggttgcagtgattgagccactgcactccagcctgggcgacagagcgagactctgtctcaaaaaaaaaaaaaaaaaaaaaggaaggggaaggagacacaggctgtcccaggcagggccattgctctgggcttcctagaagagttggcgctggcggcctgaatccattagcatctgtctgctcagccctgctgccaggaatgcccccaggagcttcaaggctgtgaacttttcattcactcagcccttaattcagtgcatagtgagtgcggactgcatgccaggctttgtaagggaggccagcaggctggcccttgggcttctcaaggttttgctttcaagctctctctctctctctttctttaattactttgtaggcggttttcctccccttcaagctgaagctccatccatgccttggatctgggctgcatcaaaggcagagactgggctcgaggtggggagggagcagggcttgttttcaattccattctgtttggattcagtcgcagcaaaattgacagagctcctgggatggggaagtaaaaacaggaacaagactacaagcccctaccctctggagaaagtgctgtgcctcgcgtaggggcctgaggtgtggctccagtcctgggaggggagcagggactagaggaatcccatttggctggtgtcatcaggggacatccccttcttggagaggacattcttcctgagcttcaaatgacagaggaggccaggtgcggtgggtcacacctgtaatcccagcactttgcgaggccaagagggggcggatcgcctggggtcaggagtttgacgccagcttggccagcatggtaaaaccccatctctactaaaaaaataaattggccgggtgtggtggtgggtgcctgtggtcccagctgcaggaagcagaagatttgcttgaacctgggagatggagcttacagtgagccgagatggcatcactgcgctctagcctgggtgacagagtgagagcatgtctcaaaaaaaaaaaaaaagacaaagaggctgggcgcggaggctcacacctgtagtcccagcactttgggaggccgaggtgggcggatcacgaggtcaggagatcgagaccatcctggctagcatggtgaaaccccgtctctactaaacaaacaaacaaacaaaaaaaaccaaaaaaaaattggccgggcatggtggcgggcgcctgtggtcccggctgctcgggaggctgaggcaggagaatgatgtgaacccaggaggtggagcttgcagtgagccgagatcgcgccactgcactccagcctgggtgacagagcgagactccgtctc

SEQ ID NO: 2233 - DNA, 3935 bp, Homo sapiens
ctttcaaatataaccagtcctataatatgtgctaatggctgtgtgaagctgagtatgccttgatagcctgagaatacataatgtttcacaaatgaagagcttacctgggcaggagactttagaaggccagttgccttgcttccagctgaaggagtagaacaccagcagctctcagaccatacaaattgctagacaccttttcctgttgtggcatggtgcaatgaggagctcttacctatgcctggagacatgccatctaaggactcgttggctgcagtctgtgcagatcttcacatacaaggagatggccatagctgtggtgctctgcagatgtggcagtggcttcatcaggatgaacgaggggcccctggagatgatcaggctgctcacactgcaatacaagctactggaattaggtctgcttctggacaaggaacagcttgctggaatggacatccatgttcgtgtgaagggtagtggtcatgtggttcagatttatgctgtccttcagtacatctccaaagccctggtaccctgttacccaaaatatgtagatgaggcttccgaggagatcaaagacaccctcaccagaccttgctggtggttcacccctgttgctatgaatccaagaaatttgcaggccctggtgcctgtgctcactaccagaaatcatagcagtaagcccatcaaaaagatcaaggtttacctttatagtaaacaatggttgaaggtctttaaggttaaaaaaaattgctagacatcccagctgccctagaagcagagatgacatgtgctgttattttaaagggccttgcttacctgcatattacctgttagggctttcaggtagaatataccaatgatagaccagtctggtggcactgttcccaaggacggaatagggtgaactttgatgtctaggcactcaaatactccataataaaatgatcatggaaactggcagtcttactccaattgcccaggatggagtgcagtggcaccatctcagctcattgcagcctcaaatttcccaggcccaggtgtccctcctacttcagcctcctgcatagctgggactacaggcaagcaccaccatgcccagctaattttttatatttttggtagagacaaggtttcaccgtgttgcccaggctggtcttgaattcctaggctcaagcagtctgcctgcttcagcctcccaaaatcctgagattacaggtgtgagccattgtgcctggcctggccctcttatttaaccttgttttggttggcagcaacattgagcccaggctaaagtacaccatacatgtcggacagagcttatctgcctcagtagccacttggtcagtatttgttgatcacttaaacccactcagtgttggtcatttgtctgtgttagcctctgctaaggaatgtggaccctacacgtgacaatacagttaccagtaaaaagactcagtaggaattatgaggtatatactcgaatcaacaggtagttggtgatgctgccaacttactgatttagtgtatgatggtgtttttgaggtgctccagtggcttctgtttctatcagctgtccctcctgttcagctactgacggggtggtgcgtaacggcaaaagcaccgccggacatcagcgctatctctgctctcactgccgtaaaacatggcaactgcagttcacttacaccgcttctcaacccggtacgcaccagaaaatcattgatatggccatgaatggcgttggatgccgggcaacagcccgcattatgggcgttggcctcaacacgattttacgtcacttaaaaaactcaggccgcagtcggtaacctcgcgcatacagccgggcagtgacgtcatcgtctgcgcggaaatggacgaacagtggggctatgtcggggctaaatcgcgccagcgctggctgttttacgcgtatgacagtctccggaagacggttgttgcgcacgtattcggtgaacgcactatggcgacgctggggcgtcttatgagcctgctgtcaccctttgacgtggtgatatggatgacggatggctggccgctgtatgaatcccgcctgaagggaaagctgcacgtaatcagcaagcgatatacgcagcgaattgagcggcataacctgaatctgaggcagcacctggcacggctgggacggaagtcgctgtcgttctcaaaatcggtggagctgcatgacaaagtcatcgggcattatctgaacataaaacactatcaataagttggagtcattacccaggtagtttattattatactacgggtatggctgtgtatgttgcagttaggttcagctgcagcgatggacatgccaaaataatagtggtttgaataatggtatcccaaaacaaagtagaagtgtgtatctcttatgaaaggcagggtggatggttcagggctagtatgaccctgcgtaaattccttgctcatcatacgtctgtcaggcttagtgtggcctcagtcttccgagcagcaggatgtaagaagaaacagaaagtagaagcgcggatggtgctttcttttatgggaagttcccagaaacagcctccagataactttgcttacatctcattggctagaacatcaccccgtggctgcaggtggctggaaaatctcatctttattctgggtggccatgtgcagctaaaagtactgctactgtttatagagtttgggcaagaaccggctgtctgtgccatgggtggtagacgagaccagcagtccccactcacttggaactgagagtctgggggaaggatagtgacaaaataaacagatacttacagtgacaaggcctctgagaggtctgcaaaggtgtgccctgcgagtaaacaggaaggacacctaaatcagactggtggggtgggggaggggatgaggaaacgttgcctagagactaagcaagaatctctctggactgaggaaatgggcagggtattgaagcaaaggctcggaggcaaagggggcaggtagttgggtgatggaggagcatatgaggaacagaaagtagaccagggaagccagagggagacagggttctgatcacatgggccctggggccacagggacaggtttggtcattttccccggagcctttgactggtttctggaggtgagtaacctagacaggtgctttcagggggtgaggagcagcacaagactagaggcaggaaatatccactgggagagagtgtactaatctggttgggaaatgatggtggcttcagctacatagtggctttggggatcaagagaagtggatgcaaatcctgtaaatcccatagagcttggaatttagaaataatttggccttttcacgtaataggtgatgaaaccaagaatgagaatttaaatggcttgcccagaatcacacagctagctgtggagcagcaccagatatcatttctctatctaactctttcctttatgtcactgttgaatgtgctgatttgggagaacagggcattgtgggcattttggagccagcaacaggacctgaatcctggtgtccattgcagagggaggagtccaccctgctttgggggctggattcctggtaaggttatggggcaggtcacagaaatgagggagttggaaggaaaaaccaggtgtgagaagatgatggattcagtttttggtttgttgatttggagattcaggaccaccatctgtaggtggagagagatcagatggaaactggtccttgagattggaattggggatgcaggattgggtggaattggtcaaaacttttctataccctttctttaaatttctccagtgaaagggactcagcaactgtttttgagtccattgtgtcatgtaccttagaattaagagatttttccagtgtttagccctgaatgatttttgctgcaatttgaattctgtgcaaccacagagattt

SEQ ID NO: 2234 - DNA, 2746 bp, Homo sapiens
gattcgcgtcccggaagcggcggtggcggccgcggcgtaggcggaggagattttcggacctgcgacttccgaacaaccctggcaggaggagcggcgttcagccgggggaggcctgaagaaacgctccggggcccagtggctctacccctgctcctgcccgaccctgccgcctccctcacggagccagcggccgggatgcagacatcagaacgtgaggggagtgggccggagctgagccccagcgtgatgcccgaggctcccctggagtctccaccttttcctaccaagtccccagcgtttgaccttttcaacttggttctctcctacaagaggctggagatctacctggaacccttgaaggatgcaggtgatggtgttcgatacttgctcagcttgatccagctggaggccttcctgagccgcctgtgctgcacatgtgaagccgcctaccgcgtgctgcactgggagaaccccgtcgtgtcctcacagttctatggggctcttctgggcacagtctgcatgctgtatttgctgccactctgctgggttctcacccttttaaacagcacgctctttctggggaatgtggagttcttccgagttgtgtctgagtacagggcatctctgcagcagaggatgaacccaaagcaggaagagcatgcctttgagagtcctccaccaccagatgttggggggaaggatggtctgatggacagcacgcctgccctcacacccacggaggacctcacaccgggcagcgtggaggaggctgaggaggctgagccagatgaagagtttaaagatgcgattgaggaggatgatgagggcgccccgtgcccagcagaggatgagctggccctgcaggacaacgggttcctgagcaagaatgaggtgctgcgcagcaaggtgtctcggctcacggagcggctccgcaagcgctaccccaccaacaacttcgggaactgcacgggctgctcggccaccttctcagtgctgaagaagaggcggagctgcagtaattgtggaaacagcttctgctctcgatgctgctccttcaaggtgcccaagtcctccatgggggccacagcccctgaagcccagagggagactgtgtttgtgtgtgcctcgtgtaaccagaccttgagcaagtgagaagagaggccagggtccaaccaggcacccgtccttgggaccagcagtagaccccccactctccccacccctggcccactgtggtgtgtgctgggcaaatgtggcctgaatgctaggtaggcttccccttccttcctcactctctccagctggattctggagctgttctccatccatgagagtggctggcaatggctgctctcaatcccttgagggagaagagcccctggagggcctggcatgtttgtcctgctctgcctgggactgagcgagtggacttagggctgggcaggcagtagccaccagagggcagcagcgaactaggccaggcctgactggggtctgaagatcagggtcagtgtggctgtgcctgggaattccagacctgaggttgggaaaagaggtttttctcctgcagggtactgggccaggccctcagcctcagagagcttgcagaagggcttgggagtgccacaccccatctctgctgattgaatgtccctccaggcaccaggatctcatcatttccccatcagagggtgtggccaggcctaacaagaccatgggtgcttctagaaacagggttgaatttcccagattccctgagaggagaatgtgtataggagggtttggctgagtccttcagcgttaagtggaggaaagcttggggaagccccaatagctggacagacctcggcctcccctcgaagacacctcaattcacagactctcagcccacacaatgccccagtgtccccagctccgctggagcagctgcagggcacttggatcacaacttctgcaccctctgtccagagtctagggcagtcctccactggcccagcactccagtttcctttccctgcctcttgtccaatggagtgggaggccaggtgagtggagcagaggtcctgaagcccttgacccctgggggcctgggtagtgtaggatctcgctgggctgggtcctggattccagggctattccctggaggacagtctcagttatgggataaggccccctgggggtctccatttctttccaacagtttcatgttcactactggactcttacgggctcagtatctctcccttagccatgagctggctcaggcatcccttcccttccctggagctgccctgcctttctcaagtatttatttatttattgcatggttcctgggaacatgtggcacaagtaatgggatgaggaggaattgggggtgggggtcttctacctaggactcttccctggagtcatgggctgcctgggacccaggacccatgagggggctgagaggtttctacactcgaggagcaggggtccagagaggcaggctggggaggcaagggacccatcctaggcccgctttcttgccgagccaagcagcttagctggggctgtgcagccaggggcttacccaggccagtggaggtgccacagccctggggagccagacaggctttggtatcgtatcgcctctgtgtccttttaagagaggagagttcagtaccccgtgctttctttacactggaaaggaactaaaaggatctctgtgtctatggagaattgtcaataaaaaggcctcaagctt

SEQ ID NO: 2235 - DNA, 1774 bp, Homo sapiens
tgccaagtgatctttcccagcagatgtgcttgccagcttcccacgcggtgtcagtaattcacccgtcctctaggaaaactagaggtgttcccctatcggaagctggtaatgtgaaaagccccaagtgtcaaaactgtcatggaaatatccctgtccaggtttttgttccagttggtgatcaaacacattccaaatccagtgaggaattgtcactgccaccacctcctcctcctccaccaccaccaccgccgccaccgccgcccccaccccctcctctccgtgctctgtcctcatcctctcaagctgcaactcatcagaacttaggcttccgggctccagtgaaagatgaccagccacgtcctctagtgtgcgaatcacctgctgagcgaccacgtgactccttggaagtgccggcggtgcgccctccccacgcctcaatcaatgagcacattctggctgccataaggcaaggggtcaaactgaagaaagttcaccctgatcttggcccaaaccccagcagcaaaccaaccagcaacagacgcaccagtgaccttgagaggagcatcaaggctgcgctccagagaatcaagagggtgtctgctgactctgaggaggacagtgatgagcaggaccctggccagtgggatggttaggctcaagtttgacaaaggcacctgccacagtaggcttgaataaagtgggtgagtcttagacctatcgaaaagcatactaacagggtgctgatagatgggccacataacaccccggaagatcagcagggccttgtgtaggctgctgcagcattttttttttttttcttttttgagatggagtctcactctgtcgcccaggctggggtgcagtggcgccatctcggctcaccgcaagctccgcttcccaggctggggtgcagtggtgcgatcttggctcactgcaagctccgcctcctgggttcacgccattctcctgcctcagcctcccgagtagctgggactacaggcgccaccaccttgcccaactaattttttgtattttttagtagagacgaggtttcaccgtgttagccaggatggtctcgatcttctgacctcgtgatccgcctgcctcagactcccaaagtgctgggattacaggtgtgagccaccacgcccagccttttttttttctttcttttgagacagaatctctctgtcatccaggctagagtgcagtggcacgatcttggcttactgcaacctccacctcccaggttcaagcaattctctgtctcagcctcccgagtagctgggattacaggcatgcaccaccacgcctggctaatttttgtatatttaagtagagacaaggtttcgctatgttggccaggctggtcttgaactcctgacctcgtgatccacctgccttggccacccaaagtgttgggattataggcatgagccaccgtgcctggctgatgctggagcttttatgtgacatggtgactcttaaaactggggagggacgtagagatgagagtttcacacaccagcccataggtgggatgtcaagacccatcggaagtgtcgctggcctaagagaagagcacttatttctcaccatggctgatctagaattgttccctgattctgaaagaagtttacactacactggtaagcagtactattagactactgactgtggccttctgtgcatatggaataatgatttctcagatttgtaggcttgaatgtgaatgttattttatcagtaatcagaataaattgcttatattcag

SEQ ID NO: 2236 - DNA, 2456 bp, Homo sapiens
aaactgtcactgaagagtcatggtgaggcccgggcctaccgctgctgccgctgtcgaagagcggcagagaaagcttcaggagtaccttgcagccaagggaaaactgaagagccaaaacaccaagccttatctaaaatccaagaataattgccagaatcaaccaccttctaaatctactattagacccaaaaatgatgttaccagccatgttgttttgcctgtcaaacctaaaaggtccatcagcattaaactccagcccagaccacctaatactgcagggtcccagaagccgaagttggagccaccaaaacttctgggcaaaaggctgacttcagaatgtgtttcttctaacccatactctaagccttctagcaagagttttcaacagtgtgaagctggatcgtccacaacaggagaactgtcaagaaaacctgtggggtcacttaatatagagcaattgaaaactacaaagcagcagttaacagatcaaggaaatgcaaaaagcacagactttggactccaagttgaaaaaggctgttccccagaaccattttctgaacaagacagctcccaaaactcaagctgatgtcacaaccgtaaatgggacccaaacaaacccaaatattaaaaagaaggcaacagcagaggatcgaaggaaacaactagaagaatggcagaaatctaagggaaaaacctataaacggcctcctatggaacttaaaacaaaaagaaaagtaataaaggaaatgaatatttcattctggaagagcattgaaaaagaagaggaagaaaagaaagcacaactcgaactgtccagtaaaattaacaacactctgacagaatgtctgaaccccatcgaagggggtgtaccttctaatgaaatacttaacatattgtccagcattcctgaagctgaaaaatttgctaaattctggatctgcaaagcaaagttgttggcaagtaaaggcacctttgatgttattgggctatatgaagaggccattaaaaatggggcaacaccaatacaagagttgcggaaagttgttcttaatatcttgcaagactcaaacagaaccacagaagggattacttctgactctttagttgctgaaactagtataacatcagtggaagagctggccaagaagatggaatctgtgaagtcttgtctttctccaaaagagagggaacaagtcacggcgacaccccgaatagccaaggcagaacagcataattatcctggtatcaaattacagattggtccaatccctagaataaatgggatgccggaagtgcaagacatgaaatttatcactcctgtacggcgttcgtcgaggattgagcgagcagtgtcccgctacccagagatgctgcaggaacacgatttagtagtggcttctcttgatgaactgttagaagtggaagaaacaaaatgttttatattccgtagaaatgaggcgctgcctgtaacattggggtttcaaacccctgaatcataatttcttgatgcttttttttaaaaaaggtgtttcagaaccaacataagacaagaaatattcttgtccaagtgacctggaaaaaaagagaggcatcatggatgcagattatggacgctcaggacttaagtaattcactgggcttactctcaaattttctctccccatgggaaaatctttgctttatgtgtttaagaccagtttgccagttttacagtatacataaatttcaaacttttgaatatttaccctacaactatgataaatatttatactttattgatctactttaatcccaacatagttttttatatcagaaggttggtcccacaatataatgggacttttctttctgcatccaccttagcagagggcaagttctttcatcgtggaagatctgaactttgacgctagcttgacaggctgaatggaccttgacagatggccaagtcaaaacccctcattttacagatgagtttatgctagctgtgcctttgctcagagatcataaatttatgtgtgatctttgactttcatcacagtatccttgtaaatgagagagaattcttgttttttctatgccaggtctcctcagatgaaacacaatcctgaattggcatggtcgtctagcttttatattcaaacctagttttgcatttgttactcagaaacacttcaagtaacaaaaggggggcaggggagaggggtggggagtggacacttgcttcttcagttctttgctcagctagggtatagctggcctgagaaggcagtgcaagccccagagactgttgtaggttgctttttcttcctcctgggcaactatttgtggaaaggttttaccttagtcattatgtaaatataattgtgtagaaaaacctagtcaacacattttaaattttagctttcttaatatttaagtattatcttaaaacaacattaaatttctattagttcctg

SEQ ID NO: 2237 - DNA, 1768 bp, Homo sapiens
aattggagaagagatttttatatgtttttgtatgatgtatacgtgttataacttttttaaaattcagatccattaaactgtttccatttcattttataaacaccaagttcttaccccatggtaaaatcaggagccctggaaatttcaggtgaattttatttgtagtaatatacctttatgtgatctaagaaccaaagaaacaagacgtggtgttcaggttttgctttgccaataacctccatgggcttctaaaaaatgtttagtataaagcttttgtatagaaaagatggagtagctctttgccctattttcttttctgacacctgtgatgaagttttcacttggccaataagccacaaactgaaccatgtttcaaaaccacatttgcccttctggtggccttgctgatgtttacaggatgttgaatgggtttgcaaggctgctgcttttttctttaagtctgtagattttgtcccagtaagttcattgtgatgtactttactatcatctgcataatgattatatggcttttttccccccaatctatctgttacataggcagtcatggccaaccaaaattgatgtaccccaggaccttgaggatgacctcacggccactcctttgtcccacgcgactgtccctcagtctcctgctcgggctgctgacagtgtcctcaatggccacaggagcaaaggcctgtgtgactcagctaagaaagatgacctccctgagttggctggaccagcactctctacggtgccacccgcaagcttaaaacccacagccagtgggcggaagtgtctgttcagggtggaagaagatgaagaggaagatgaggaggacaagaaacccatgtccctctcaacacaagtggttttgcgccggaagccatctgtaaccaaccgcctgacatccaggaagagtgcgcccgtcctcaaccagatctttgaggaaggggaatctgacgatgagtttgacatggatgagaatctgcctcccaagttgagcaggttaaagatgaatatagcttctccaggtacagttcacaaacgctaccaccggaggaaaagtcagggccggggctccagctgcagtagttcggagaccagtgatgatgattctgaaagccggcggcggctcgataaagatagcgggttcacctactcctggcaccgacgggatagcagcgaggggccccctggcagtgagggggatggcgggggccagagcaagccaagcaatgccagtggaggggtggacaaggccagccccagtgagaacaatgctggtgggggcagtccctccagcggctcgggtggcaaccccaccaatacatcgggtaccacacgccgctgtgccggccccagcaactccatgcagctggcctctcgcagtgctggggagctcgttgagagcctcaaactcatgagcctctgcctcggctcccagcttcatgggagcaccaagtacattattgatccacagaatggcttgtcattttccagtgtgaaagtccaaattacatcacaagacgtcttgcactcatgagctgtccccacattaggcttaaaaacagatgcaattcccggacgtctaaaccaaaccactttcaccgctacacgaccgggggtatactacggtcaatgctctgaaatctgtggagcaaaccacagtttcatgcccatcgtcctagaattaattcccctaaaaatctttgaaatagggcccgtatttaccctatagcaccccctctaccccctctagagc

SEQ ID NO: 2238 - DNA, 1639 bp, Homo sapiens
agctctgagagaggagcccagccctgggattttcaggtgttttcatttgctgatcaggactgaacagagagaactcaccatggaccttgggctgagctggctttttcttgtggctctgttaaaaggtgtccagtgtgaggtgctcctgttggagtctgggggaggcttaatacagccggggggatccctcagactctcctgtaaagtctctggattagactttagcagtcatgccatgagctgggtccgccagactccagggaaggggctggagtgggtcgcagctattactgttggtggttccacgtcccaggtcgactccgtgaagggccgcttcaccatctccagagacaattccgagaatactctgtatctgcagatgagcagcctgacagccgaagacacggccgtgtattactgtgcgcacgccttcgacgtgttacgatactttcacagagggttctactttgcccactggggccagggagtcctggtcaccgtcacctcagcctccaccaagggcccatcggtcttccccctggcaccctcctccaagagcacctctgggggcacagcggccctgggctgcctggtcaaggactacttccccgaaccggtgacggtgtcgtggaactcaggcgccctgaccagcggcgtgcacaccttcccggctgtcctacagtcctcaggactctactccctcagcagcgtggtgaccgtgccctccagcagcttgggcacccagacctacatctgcaacgtgaatcacaagcccagcaacaccaaggtggacaagagagttgagcccaaatcttgtgacaaaactcacacatgcccaccgtgcccagcacctgaactcctggggggaccgtcagtcttcctcttccccccaaaacccaaggacaccctcatgatctcccggacccctgaggtcacatgcgtggtggtggacgtgagccacgaagaccctgaggtcaagttcaactggtacgtggacggcgtggaggtgcataatgccaagacaaagccgcgggaggagcagtacaacagcacgtaccgtgtggtcagcgtcctcaccgtcctgcaccaggactggctgaatggcaaggagtacaagtgcaaggtctccaacaaagccctcccagcccccatcgagaaaaccatctccaaagccaaagggcagccccgagaaccacaggtgtacaccctgcccccatcccgggaggagatgaccaagaaccaggtcagcctgacctgcctggtcaaaggcttctatcccagcgacatcgccgtggagtgggagagcaatgggcagccggagaacaactacaagaccacgcctcccgtgctggactccgacggctccttcttcctctatagcaagctcaccgtggacaagagcaggtggcagcaggggaacgtcttctcatgctccgtgatgcatgaggctctgcacaaccactacacgcagaagagcctctccctgtccccgggtaaatgagtgcgacggccggcaagcccccgctccccgggctctcgcggtcgcacgaggatgcttggcacgtaccccgtctacatacttcccaggcacccagcatggaaataaagcacccaccactgccctgggaaaaaaaaaaag

SEQ ID NO: 2239 - DNA, 2667 bp, Homo sapiens
gtgctggggggtcggaccctgtgggggctgtgggggcgtcgggcgcggtgggctccggggggcctggcctgggacctgcccagtgcattgggggtgcacctggagcccgctccgcctggtgcccccacggccctcgcagggtctggcctcccggcgtgcacctgcccctccctgcaccccagatgtccaccctgcctgttccctgacttcctccatcctgtccagcaggatgggctggacagtgggacagcctgtgtgcacattttgtggcaagtaggagtgacacaccatccctgggaggcaccatggttcctgccaaacccaaccccagaactctgtccctgaggtggttttaccaaaacccaaaacccagaattgtgcttgtggctcaggggtcagcacctgctagtaccaggacactactgggaggctgggacctgaccgaagcccatggtgtctgtggcctgaggacagggtggtgttggggccataggtcccggccaccaatggccattgggtcctagggcctcagccccagtgtttgcccttccctggctccttctggttcagtcccattagggccctggagcccaagacccagcacccaaggtcccctccaggaatactggcggcttggcttcctttatcatgtttcatctgagagcaaaaatgtcagatcggatgcacagaaaaatggcccaaattgtttaataactagaagaaatataggagcagcaagagggtaatatggagaggggagggcctccatgaccggtgtctgcagagccaggggtacaggcacccagtgttgtggcctggcaccaccggcctctcagagcgtgggtggcccactgtctttacccggaggacagcaggcctgatcaccagcttttctacctgtccctgtaagcatcacgttgctagaagaaaatctcatgccagagcttgcaccatccctagcttgggggttaggggttgtctcttggtgacctaaatgaaaaaataggtccagatcagagttcctgacgcagagcactcacccactctttgaatcgtgggaggggaggcctggttttagttaaacctaacctctttgaggaaccacagagcccaagactggaagccttcagaatcttctggcccccaaccctccctggggacccctgtggcctgtctcaccagagcactcttctgtctgtagatgtctcagctgctctacaagggagtcccatttcaggtgtggggctgggcatggtcactcctgctggatgtctagaaggtggaaactaaggacctaggaaaatgccagatacagcctttccaccctcatccagagcaggacaaacaggcccggtggtgtcaggagcccaggtctccagctggagggaacgtcaaccctgcagtgggagcaggggcccatcgcacatcctaggcacagatgctaatgcaggcactgcaggtaagctgggcttggtatccttccctggcttcagaaagaagccaacaaggagcgttttgcagaatgaaacctttgtttccagaagcactgctgactgtaagtggttgccgtttgtggcagtgagcattttgtccattctgaggttggattggtttctccttttggccttgccctgccctacagaccataaaggagaacagcaagaagcccccagcaaacatccacagatggccctggacatcagccacattctgaggaacatgtcatgttctgggagggctaaggcatcaagtaaggcctgtggggctggaggatcccaggcaaggtggggcaatccagagccatgggggcttcccatgggaattgggaggtcccaaggcagagtcagaggttccacaggaggagtcagagagtcaccaagggctctcctggcccagggagcagtcaacaccatggactgaacacttgctgggctccaacccttgggccaggctgcccatgtggggccaggaggcagctcagagtgggaggcagagagagaagtgtgctcagagggcacctgtatctggatgtaatgtggtcctgagactctggctgggaagtgcttccagggtatcatatgtgttatgcagctacttcctctccccagccttaccctgtaggaattctagtgactatgttgccaccatcttggagctccatgccctcatagtgtaatggcaccagcagatctgcctgtgcacagacttcctgtactacctcactcctgaggggagatgcttctgcgggcctgcgacctggtgctcaactttagacaccatcatcctggagcggcactgcaccctcactagccagggtgttgacgtcctcaaggccaaggccacattcaagactttggacttcattgatgcacttgtgccgagcaagatcctggttggagtaaaacattccatgggaactcgggctgtgagaaatgtcctaaccacctgactgcagaaacatccttatcacatcctgctgggcaaaggcccaacagcctgacttcaggaacatccttatcatcttctactgagcagcaagctatactgtccagagccctccctcccagcgctatgattaccccagcctgtgagcggcagtgggcactgacactaagctggtttccccctccgcagggttttgctagtaataaacctgtgttgctgttg

SEQ ID NO: 2240 - DNA, 2324 bp, Homo sapiens
ataaatggaatcatagggcatgtaatccttgggattggctttcttcacttagcataattctccaaactcttgtgtatttcaatagtctattcctttttattgctaagtagtagtccatggtatggatggaccacggtttgtttaatccatccgaggacctttttaaaatgcttgtgcccagatgcggtggctcactcctgtggtcccggcacttggtgaggtcaaggcgggaggattgcttgaccccaggagttcgagaccatactgggcaacatggcaaaaccctgtctctgcccaaaatgcaaaaattagctgggcgtggtggtgcacacctgtggtcccagctacttgggagactgagatcagaggatggtttgagcctgggaggcagaggttgcagtgggctgagattgtgccactgcactccagcctgggcaacagagccaggccttgtctcaacaatcaatcaatcgatcgtgtgttcctgatattaaaaaaaaaataaaaatacttgtagccgccgggcacggtggctcacgcctgtaatcccggcactttgggaggccaaggcgggcggatcacgaggtcaggagatcgagaccatcctggctaacacggtgaaacaccgtctctactaaaaaaatacagaaaaattagctgggcatggtggcaggcgcctgtagtcccagctactcaggaggctgaggtaggagaatgacatgaacccgggaggtggagcttgcagtgagccaagattgcgccactgcactccagcctgggcgacagagcaagactccgtctcaaaaaaaaaaaaaaaaaaaaaaaaaaaaaaaacttgtagccaggtacagtggctcacacctgtaatcctagcactttgggaggctgaagcaggaggatggcttgagctcaggagtttaacaccagtgtgggcaacatggtgagaccttgtcgctacaaaaagaaaaaaaaaaaaaacctgggtgtcgtggcacatgcctgtagtcccagttactcaggaggctgaggcagtaggcccacttgagcctgggagttcaaggctgcagtgagctatgattgcactgtacgggtgacagaccaccccctccactactacccgcctccaaatacatctatttttttttttctgagacggagtctcactctgtcgcctagtctggagtgcagtggcacaatctcggctcgctgcggcctctgcctcccgggttcaagcaattctcctgcctcagcatctcgagtggctgggattgcaggtgtgtgccaccacacccagctaattttttgcatttttggtagagaaggggtttcctcatggtggccagggtggtctcgaactcctgacctcaagtgatctgcccgccttggcctcccaaagtgttgggattgcaggcatgagccaccgcatccagcctgcatctttccctttttttttgggggggggacggggtcttgctgtgtctcccaggctggagtgcagtggcatgatctcggctcactgcaatctctacctcccgggttcaagcgattctcctgcctcagccttgtgagtagctgggattacaggcatgtgccaccacgcccaactaatttttgtatttttggtagatatggggtttcaccgtgttggtcaggctggtctcgaactcctgacctcatgatccacccacctcagcttcccgaagtgctgtgattacaggcatgagccacagcacacagcccatctttttttaaactatgtttgtttaatcatcacaaatctattcatctatccactcctttatttatctatccacctcttattttgtacacatttcaaagtaaactatagacatctgtatacttatctttaaatatttcaatatgtacatcattaactggtgttaagtatttctttatagcttttcctcttggtggaaagtttacatacaaagaaatgtacacattttaagtacatgttcactgggttttgacaagtacatgcatcagcaaaacccaaaaccctatcaagatagagaatgtgtccgggcgtggtggctcacgcctgtttttccagcactttgggaggccaaggctggaggattgcttgaacccagaagttcgagaccaacttgggcaacatggtgaaaccccatctctaccggaagtacataaaaattacctgggtgtggtggcgtgcacctgtggtctcagctgcttgggaggctgaggtgggagaattgcttgggcccgggaggcggaggttgcagtgagccagcatggcaccactgcattccggcctgagtgacagagccagaccctgtctc

SEQ ID NO: 2241 - DNA, 1625 bp, Homo sapiens
atatctccaccagctccaccctcccctgggttcaaaagacgaggacagggcctcgctcagtgaatcctgctctccaccatggacatactttgttccacgctcctgctactgactgtcccgtcctgggtcttatcccaggtcaccttgaaggggtctggtcctgcgctggtgaaacccacacagaccctcacactgacctgcaccttctctgggttctcactcagttccagtggaatgcgtgtgagctggatccgtcagcccccagggaaggccctggagtggcttgcacgcattgattgggatgatgataagttctacagcacatctctgaagaccaggctcaccatctccaaggacacctccaaaaaccaggtggtccttacaatgaccaacatggacccagtggacactgccacgtattactgtgcacggatggcagattgtattggtgggagctgctacgatccccaattcgtttttgacttctggggccagggaatcctggtcaccgtctcctcagcatccccgaccagccccaaggtcttcccgctgagcctctgcagcacccagccagatgggaacgtggtcatcgcctgcctggtccagggcttcttcccccaggagccactcagtgtgacctggagcgaaagcggacagggcgtgaccgccagaaacttcccacccagccaggatgcctccggggacctgtacaccacgagcagccagctgaccctgccggccacacagtgcctagccggcaagtccgtgacatgccacgtgaagcactacacgaatcccagccaggatgtgactgtgccctgcccagttccctcaactccacctaccccatctccctcaactccacctaccccatctccctcatgctgccacccccgactgtcactgcaccgaccggccctcgaggacctgctcttaggttcagaagcgaacctcacgtgcacactgaccggcctgagagatgcctcaggtgtcaccttcacctggacgccctcaagtgggaagagcgctgttcaaggaccacctgagcgtgacctctgtggctgctacagcgtgtccagtgtcctgccgggctgtgccgagccatggaaccatgggaagaccttcacttgcactgctgcctaccccgagtccaagaccccgctaaccgccaccctctcaaaatccggaaacacattccggcccgaggtccacctgctgccgccgccgtcggaggagctggccctgaacgagctggtgacgctgacgtgcctggcacgcggcttcagccccaaggacgtgctggttcgctggctgcaggggtcacaggagctgccccgcgagaagtacctgacttgggcatcccggcaggagcccagccagggcaccaccaccttcgctgtgaccagcatactgcgcgtggcagccgaggactggaagaagggggacaccttctcctgcatggtgggccacgaggccctgccgctggccttcacacagaagaccatcgaccgcttggcgggtaaacccacccatgtcaatgtgtctgttgtcatggcggaggtggacggcacctgctactgagccgcccgcctgtccccacccctgaataaactccatgctccccc

SEQ ID NO: 2242 - DNA, 1939 bp, Homo sapiens
cttttgtggcggcgcccgcgctcgcaggccactctctgctgtcgcccgtcccgcgcgctcctccgacccgctccgctccgctccgctcggccccgcgccgcccgtcaacatgatccgctgcgagcgctgccgctggatcctgcccctgctcctactcagcgccatcgccttcgacatcatcgcgctggccggccgtggctggttgcagtctagcgaccacggccagacgtcctcgctgtggtggaaatgctcccaagagggcggcggcagcgggtcctacgaggagggctgtcagagcctcatggagtacgcgtggggtagagcagcggctgccatgctcttctgtggcttcatcatcctggtgatctgtttcatcctctccttcttcgccctctgtggaccccagatgcttgtcttcctgagagtgattggaggtctccttgccttggctgctgtgttccagatcatctccctggtaatttaccccgtgaagtacacccagaccttcacccttcatgccaaccctgctgtcacttacatctataactgggcctacggctttgggtgggcagccacgattatcctgattggctgtgccttcttcttctgctgcctccccaactacgaagatgaccttctgggcaatgccaagcccaggtacttctacacatctgcctaacttgggaatgaatgtgggagaaaatcgctgctgctgagatggactccagaagaagaaactgtttctccaggcgactttgaacccattttttggcagtgttcatattattaaactagtcaaaaatgctaaaataatttgggagaaaatattttttaagtagtgttatagtttcatgtttatcttttattatgttttgtgaagttgtgtcttttcactaattacctatactatgccaatatttccttatatctatccataacatttatactacatttgtaagagaatatgcacgtgaaacttaacactttataaggtaaaaatgaggtttccaagatttaataatctgatcaagttcttgttatttccaaatagaatggactcggtctgttaagggctaaggagaagaggaagataaggttaaaagttgttaatgaccaaacattctaaaagaaatgcaaaaaaaaagtttattttcaagccttcgaactatttaaggaaagcaaaatcatttcctaaatgcatatcatttgtgagaatttctcattaatatcctgaatcattcattttagctaaggcttcatgttgactcgatatgtcatctaggaaagtactatttcatggtccaaacctgttgccatagttggtaaggctttcctttaagtgtgaaatatttagatgaaattttctcttttaaagttctttatagggttagggtgtgggaaaatgctatattaataaatctgtagtgttttgtgtttatatgttcagaaccagagtagactggattgaaagatggactgggtctaatttatcatgactgatagatctggttaagttgtgtagtaaagcattaggagggtcattcttgtcacaaaagtgccactaaaacagcctcaggagaataaatgacttgcttttctaaatctcaggtttatctgggctctatcatatagacaggcttctgatagtttgcaactgtaagcagaaacctacatatagttaaaatcctggtctttcttggtaaacagattttaaatgtctgatataaaacatgccacaggagaattcggggatttgagtttctctgaatagcatatatatgatgcatcggataggtcattatgattttttaccatttcgacttacataatgaaaaccaattcattttaaatatcagattattattttgtaagttgtggaaaaagctaattgtagttttcattatgaagttttcccaataaaccaggtattctaaacttg

SEQ ID NO: 2243 - DNA, 2269 bp, Homo sapiens
tagtattataattattgctttaagaactcttatgttttaaaaaggaatagaagaaaagagaaaaaaccagtcttttgtgtttaccttcctacttactgtttccagtgttcttcattctttcctgtgaattcaagttaccatccagtgtaatttccttttggcccaaaggattttctttagtctttctcagacagctctgccagtaattaattctctcagtttttgtttatctaggaatgtcttattctgcctctatttttgaaagggttttgctgaatatgaaattcttagttgacatatgtatttttttttcctttcagcatgttcaatgttattcttctgccttgtggcctccattgtttctgatgagaagtcatcattcattctatttttgtatttccctttttataataagttatttttctctttcagcagtttgactctgatgtgtaaaaatgtagatttcttttcttttttttttgagatagagtctcgctctgtcaccaggctgaagtgcagtgacatgatcttggctcactgcagcctctgcctcccgggttcaagcaattctcctgcctcagcctcccaagtagctaggactacaggtgtgcactgctacgcttggctaatttttttgtatttttagtagagatggggtttcaccatgtgggctaggatggtcttgatttcctgacctcgtgatccacccgccgtggcttcccaaagtgctgggattacaggcatgagccaccgtgcctggcatgtgtagatttctttagttttatcctatatgggatttattgagcttcttgggtctgtagattaattttttcatcaactataggaggctctcagccattatttttcaaaaaaaatttttttcctgccacattgtctctcttctccttctaggactcttattccatgtatagtatattggtattcttgatattgtcccacaagtcacttaggctgtgttcatttttcttcagtcttttttttcttttttcacgttggataatttctgtagatctgtctttaagtacactgccttttttcttccatcatctcaaacccattgttgaatccatgtagtgcattttttatttcagtagttgtacttttcttttttttttaaaaaaggagtttcactgttgtcgcccaggctggagtgcaatggtgcaatctcagctcactgcaacctctggtccctgggttcaagtgattctcctgcctcagcctcttgagtagctgggactacaggcacgtgccaccacacccagctaatttttgtatttttagtagagatggagtttcaccatgttggccaggatggtctcgatctcttgacctcgtgatccacctgccttggcttcccaaagtgctgggattataggcatgagtcattgtgccctgccagttgttgaacttttcaactgtagagtttgatacttattgaaagtttcagtttcttcattgatattctttatttgttgagtcattggtgtcatatattcatttaattctaggaacatttgtttcctttactcttttttttttttttttttttgggatggagtctcacactgtcacctaggctggagtgcagtggcatgatcttggctcactgcaagctctgccttctgggtttacaccattctcctgcctcagcctcctgagtagctgggactacaggtgcctgccaccacgcccggctaatttttttttgtatttttagtggagaccgggtttcaccatgttagccaggatggtctcgatctcctgaccttgtgatctgcccacctcggcctcccaaagtgctgggattacaggcatgagccattgcgcctggcctactttagtttttttgaacagaattttctttaattcttggctcatattcataatggctgctttgatgtctttgctaaattgaatatcttggcccacttagacttcattttccttgactgatttcccccaccttgattataggtcactttcttgtttctttgcatatcctatattttttttgttgttgaaatctttttgataatatcttgtagtatctctggattctgatttactttttgaagtgtttgtttgttttttggtaactagcttgctcttagccagttagcacatatctccctatgatatgtgtctatagatatctctgctcaatttttgtgtgcttatttattttttggcctggcttcctaggtgctgctcctatgtccatatagcttagtggtgagccaatgaagag

SEQ ID NO: 2244 - DNA, 1999 bp, Homo sapiens
ttatttatttgacttgtttgtatccctgaactagaatgtaagctccatgagggcaaggccttcctctgtctcgtttccctgctgtatccccagtgcctggaatagtgcttggtgtgtagcaggcactcaataaactgtggaaaggatgaagatgcccccagttggggttggggagggcgaccagctggcctgtgccgtagccggtcacagcacatcatgctctgttgcaggtcactgcaaggggatgctgcaccccctcaaggtgaggcctctccctctggggcccctcctttctgcctggttgggggcaggaggctcagtggggtggggatagggcccagacacagccttacacaaacacagcctttgagcttcacgcaccaacggagccctgggcacacatgcctggccggcacagtcctgtccactgaggcaccaacccaagcccaggcctccgactgcagagtaacaggcaggtattccgtgcaggtgaagagctgattgaggctgccaagaggaacgacttctgtaaggtactagctccaggctccagttccttcccccagcagctccctcgggccctggggagcgaggcctctgggttgggccaagagctgacctgctcaggtgctgtcatctgtcatcgtctggccctctgtgggatctccagtgatcgtcccattccacttcactgtatctctgtctaggccacaatagatggctcctagtaggggcttcctagctcagtccacctgtccctggtgcttagaaaggagcaggtcagaggaagcactgctccagggcttggtcaccagtgctgccagagagcccacaggctgtggggtgagaggcccctcctccggtgtgctccagagagacccacagaggcaactcaggagtaagatgtgtgagcgcactcgtttcaggcctgtgctggtgtacccggctgtgggccagcgtgtgagctcagggaaggaggggtggccccaggaggtccagccctgccatgcctcctgccctcagctccaggagctgcaccgagctgggggcgacctcatgcaccgagacgagcagagtcgcacgctcctgcaccacgcagtcagcactggcagcaaggatgtggtccgctacctgctggaccacgcccccccagagatccttgatgcggtggaggaaaacggggagacctgtttgcaccaagcagcggccctgggccagcgcaccatctgccactacatcgtggaggccggggcctcgctcatgaagacagaccagcagggcgacactccccggcagcgggctgagaaggctcaggacaccgagctggccgcctacctggagaaccggcagcactaccagatgatccagcgggaggaccaggagacggctgtgtagcgggccgcccacgggcagcaggagggacaatgcggccaggggacgagcgccttccttgcccacctcactgccacattccagtgggacggccacggggggacctaggccccagggaaagagccccatgccgccccctaaggagccgcccagacctagggctggactcaggagctgggggggcctcacctgttcccctgaggaccccgccggacccggaggctcacagggaacaagacacggctgggttggatatgcctttgccggggttctggggcagggcgctccctggccgcagcagatgccctcccaggagtggaggggctggagagggggaggccttcgggaagaggcttcctgggccccctggtcttcggccgggtccccagcccccgctcctgccccaccccacctcctccgggcttcctcccggaaactcagcgcctgctgcacttgcctgccctgccttgcttggcacccgttccggcgaccctccccgctcccctgtcatttcatcgcggactgtgcggcctgggggtggggggcgggactctcacggtgacatgtttacagctgggtgtgactcagtaaagtggatttttttttc

SEQ ID NO: 2245 - DNA, 2236 bp, Homo sapiens
aacgtcattgccagtggctccgaggactgcacagtcatggtgagtggtggtggggacccaggggctgggagaggggctctaggatgggatctgacatttggagtcctgaagactcactggcccctcctctgcaggtgtgggagatcccggatgggggcctgatgctgcccctgcgggagcccgtcgtcaccctggagggccacaccaagcgtgtgggcattatggcctggcacaccacagcccagaacgtgctgctcagtgcaggtgctgcgggaggaggggcttgggggtggctcgtggcctgcagtggatgagggcaggaggctcatggcttctgacactgtggggaacgtgcaggttgtgacaacgtgatcatggtgtgggacgtgggcactggggcggccatgctgacactgggcccagaggtgcacccagacacgatctacagtgtggactggagccgagatggaggcctcatttgtacctcctgccgtgacaagcgcgtgcgcatcatcgagccccgcaaaggcactgtcgtagctgagaaggaccgtccccacgaggggacccggcccgtgcgtgcagtgttcgtgtcggaggggaagatcctgaccacgggcttcagccgcatgagtgagcggcaagtggcgctgtgggacacagtgagtgctggggcaggaagccgagggcccccaggctgggaaccaagactggaggtttcgtccctgctctgccactcacctggcaggatggccatgggcctcagtttacccaggcgtgagatggttgttcccactggttggtcgggagggccctcacaggtcactgcccagggaagaccaccatcccagggcctgggatgttacctctcacctgtgtctacagaagcacctggaggagccgctgtccctgcaggagctggacaccagcagcggtgtcctgctgcccttctttgaccctgacaccaacatcgtctacctctgtggcaaggtggcctcgtcgggcggggtgggggtgggaggtgggcaggatgggcctggagagggccagggcagtgggcatccgctggtattgaccctccctccacacctgccacctacagggtgacagctcaatccggtactttgagatcacttccgaggcccctttcctgcactatctctccatgttcagttccaaggagtcccagcggggcatgggctacatgcccaaacgtggcctggaggtgaacaagtgtgagatcgccaggtgactgacccccggccctgaccgcagcatgctccttgggcagtgggcagtcccaagcccacccaaccagactgtgggccccgctcaccttccccttcccacaggttctacaagctgcacgagcggaggtgtgagcccattgccatgacagtgcctcgaaaggtgatgctcccccgccccaccctgggctccaggctgggcactgactttgcggtcttgtggggggtgtcctggcataagcgctttcctcactatccctggccttgcccacagtcggacctgttccaggaggacctgtacccacccaccgcagggcccgaccctgccctcacggctaaggagtggctggggggtcgggatgctgggcccctcctcatctccctcaaggatggctacgtacccccaaagagccgggagctgagggtcaaccggggcctggacaccgggcgcaggagggcagcaccagaggccagtggcactcccagctcggtgagagggctgggaagccagggaataaaactgggagggtggggtggggctggtgtttggggcacctcaaactcacaacattgggaatctttgtgggtccgggaatggtaatcctgaggcctcagaacacaggtttcagattgataggcctgcaggtctccaggcagcaaccagctgagcgactaaagggcccaaggccagggctctagggatggggctcagcagaggctggggtaaggggagccagggaggagctgggcctaatgcagcaccgggtccccaggatgccgtgtctcggctggaggaggagatgcggaagctccaggccacggtgcaggagctccagaagcgcttggacaggctggaggagacagtccaggccaagtagagccccgcagggcctccagcagggtcagccattcacacccatccactcacctcccattcccagccacatggcagagaaaaaaatcataataaaatggctttattttctggt

SEQ ID NO: 2246 - DNA, 2130 bp, Homo sapiens
ttttacaccccagtgaagctgaagatttttctttccgtttttaaaaatgtttactccccagggcagtgaacacctggtgcctctgtctagcgcaagaggtgaacgtttgccacttccgtttctttcctcctaccagacctgaccctccttttgtgacgggaacatcctgcaggcagtctgtcctgctttcatagactttgagaaacggggtccaaattgccggctgtgggtgggacaggcgacactgcagtgaagaggtggagtatttttgtagcggggaagaaatacatttcctctaccctcttaggttcagtgtttgggggtctgtgaattaaactcactcaagataaattaatgagagaaaagacagatttaatcacatacgtatgggatttcactgaaaaacgtgactcaaaagagcaggtagaaggtggggcccgtgactggtccgaaggtagtgagttatctcagttgattgttcacagtcagttacagattagactccttgttccactgtctcccctcttcccacttgttttgttttttttgagtcagagtcttgcactgttgcctgggctggagtgcagtggcacgatctcggctcactctaacctccgcctcccgggttcaagcgattcccctgcctcagcctcccgagtagctgggattacaggcacccaccaccacgcctggctaattttttgtatttttagtggagacggggtttcgctatgttggccaggctggtctcaaactcctgacctcgtgatctgcctacctcggcctcccaaagtggtgggattgcaggcatgagccactgcacccagccaactagtcttaaaaaaaaaaaaaaaaaaaaaagaacttagggcccgtatactatcttaataggaaaaaaggaaggggtgaaagcacatattatgggccgggtgcgatggctcacgcctgtaatcccggcacttcgggaggccgaggcaggtggatcacctgaggtcgggaattcaagaccagcctggccaacatggtgaaaccccgtctctactaaaaatacaaaaattagccgggtatggtggtgcacacctgtaatcccagctacttgggaagctgaggcaggagaattgcttgaacccacgaggcggaggttgcagtgagctgagatcataccattgcattccagtctgggcaacagagtgagactgtgtcttaaaaaaacaaataaaaaaaaaaaagcacatattatggcaaaacaaatgagtttttggaaagataaataggcccttaggagctgagatgggagatgtgaagtcttgtgacaatgtcttcttaggtgtggtgtggaaactactcacatcttccagggaagagtcagttgctcccagggagcagatttgggcctgtataccatcttaataggggaaatggaaggggcaaaagcacatattatgggctgggtgcaatgtgcccagtgcaggaggcagacgtggtttatggttgctgttgaaaccagtgcagggcccgattgctttgtattgagtgttgaggatcctggttttgtatcagccatgagtttgcagctctgggacacacttgatgttggctcaaggggaaatgaggttggaggggcagggtggttggattggatgtgggcctggggccattgctgatctacaaagtggtcatcacacgggaataatagagctggctacagaccacaaccagcaatattatttaaaagtaaggtcacacttttaataataagtcgcattttaagttattatcaatttataaaacacactgttggtataatgatagcttttcaagaaggatataaaaaggcatgttgggctgggtgcagtgactcacgcctataatcccagcactttgagaggctgaggtcggcggatcacttcaagccaggagtttgagaccagcctggccaacatggtgaaaccctgtctctgctaaaaatacaaaaaaaaattagcttggcgtggcggcgcatgcttgtaatcccagctacgggggaggctgtggcagaagaatcacttaaaacctgggaggtggaggttgcagtgagctgagatcgcgccactacactccagcctgggcaacagagccagactccgtctc

SEQ ID NO: 2247 - DNA, 1961 bp, Homo sapiens
gtttggcatgtccaacagttatgcagagtgctacccagccacgtatgtgaaacctggttaaggaagggaggctgggatgattgggaaacaagttgggggtgaaatggaaatttgattcgctaagtcccagggctacttcttttttttttttttttttggagacagagtctcactctgtcacccaggctggaatgcaatggtataatctctgctcgctgcaatctccatctcccgggttcaagcgattctcctgcctcaccctcccaagtagctgggattataggcatgcatcaccacacctggctagtttttgtatttttagtagagatgaggtttcaccatgttggtgaggctggtcttgaactcctgacctcaggtaatctgccctcctcagcctccaaaagtgcggggattacaggagtgagccactgcgcctggcccaaggctacttcttacttggatgaactattttattaggctctaagtgggaggtctagggggtggtcattcctatgcagataacctcttagtcgggtaggtttccagatgaagcatagggtcagggtatgcaacatctgtttaactcttgcttctccttaggatggatgacatggctgtggatagtgatgaggaggtggattatagcaaaatggaccaggtatgtagttagaaggatggtgggcgcctttgggcagttattatttgttttacatgtatctccttccccactcctaaaaaatctatctcatttactgggccccaccctcctttagctgcagcagtagaaacagcagcattgagggtcatgagcagcttaactatttcagagtctttgcacaagatcaaatgacatagggtcaaaaatctattttttacttcctatagcaaagtgccaggctttgattcccatggtaggcagtaaacaagcatcaatgcataagtagaaagggcagaaaaaattgcagtctttggaaaataactaaattttattctagccaggattgaagttttcctctaagtcttaagcaaaattaaaaagaaaaaaaccactaatgccactaatagtgaagaagtctgtgttcttcccctgagttcactgtattgaaatagcatggtttaatcttggagccttgtttaatcctgcctctactgtttattagttttgtgaacttgccaagttctttcactgtttatgcctcagtttcctcatcaggaaaatggagagaaatatagttccctcttcatagattttatgagaattaagtgagatatgcatttagtgtacagaataatgcctgtcacatagtaagtatgtaataagcatttattattacttatcagggtatgatttatgaattgtggaacctgggattatgggagagtctggcttcaatcaagggctgaaattccatttccactgacatctcttccttccccatcccccgattctgtcctgcaacagggtaacaagaaggggcccttaggccgttgggactttgatacccaggaagaatacagcgagtatatgaacaacaaagaagctttgcccaaggctgcattccagtatggtatcaaaatgtctgaagggcggaaaaccaggcgcttcaaggaaaccaatgacaaagcagagcttgatcgccagtggaagaagattagtgcaatcattgagaagaggaagaagatggaagctgatgggtgagcggcattattcttcctctgtgggactggtgggaattgcttagtgtattgatcttatactgacccatttctccttccattgcagggttgaagtcaaaagaccaaaatactaatcactagttacaaccagagatgctccacaaggatatgctccccactgttttctttctacaatttccaaaggttgcaagatgtttttttgtggatgaatataaaattttattgtgtaattacttggttccattaaaattggttaacttgct

SEQ ID NO: 2248 - DNA, 1998 bp, Homo sapiens
tcttggggcctttgcccaggctgttccttctgccaggcaggcccttcctcccttggcccaaccagcaaagcgcccctcagtcttcaagggctttcctggatgccacccttgcccagagccctgctcactgcctcatgctgacagagcagcatgctctcttggcaccagcctgcacctcagccagtagggcagcctctgagctgagggaggaccctgcaggggcgcctagcagtgctgtgtggggagccgaggtatggaggagctggggagcagctatgcaaatccctacctacccagctgggccagaggcacgaggcagccaggcagggtgggagcaggggctggcgtgggaggtctgggggacagacaaggatgatggacccctcagaggcaagactaggatcagggacagatctggaggcccaggacatggctgagaggtggtcagcaggctgggggcatggagcagagagggcttgggtacaagctggagaggaaggagattctggcatgttggggtgagggcagagggacagatgaggggaggagggtgctggctaaacaggaactgaatgaatggcctgaagctccctctcccaagggttcccactcccattggcctggccctgtacgtgcactgtgtcatctccttggtcaccctctgctccaggccttctccaccacaggacctcagctgtccctccttctacccaaggtggagtcccccaaagtcccttctgtctggcctatcctgtgcccaccacctgtggcttcatccagccctcctcctctatctttatctgccataggccgcagccctggccccctgtggattgaggtcccaagtggtccagctgtggggtttggtgctgggaccctcaatggcagccggaaggtccctctgaggcagaagctcaagccccatggggacagtggctccccagtgcctggccctgagccatttctgctgtttcaggtgcccacatcaccctcatttcctcctcgcagtagccctgcaccgtggccagaaacccatccacaggcaggcagtggctggggtccgggtgccccgggctgttgggctctgcttcctccctctgctcccccatgtctccctgagttctcccacctttgctcatttgtaaaatgggcaggtcaatcttcccaccccaccgtgtgggctgccccaaccccaaatgtgcccagggaggggggggaacccaaggcacaggccccgcccctgcccccaagcagcactgggctactggctcacagaagcacctttggttctgcaggtcatgcccctccctgcagggaagggaaagctggtggtggaggctgggcacagactgacgtccagaagaagtcccttggccctgctagggtggcaccagacttctctggtcccacaggacagccagtggcctcccagcttggttctgggcccccgcctgcaagcacacatggcagggagggctttggcgggctcacataaccgagtggcaaggcccctgctcccagaggctggatttgaatgagctccgggcctgtttggggaggtgaagctgccaggtgtgcacaggggcctcccaagctcctggctccaccagccaaggaggtgggggcaagggtcagggcaatgggggacaatgccgctcagggtgcagtgagctcccctgggaaaaccgaagccagcaagaccaggagagggccacctcactgggcctgcctcccccacctcctgggcctctctgacctcagctcctagaccctggacccttggctgggactcagcattttccagtctttttcaggggtagacaggggagcctgggttaaactttaccactgtgccctggcccaggcatcaccaacacggcctccctgcagctgccctgccaccgacagaccccgattaaacccacacctggccttggcctcccctgctctataccttgcatggtttttgcctcacttggaataaaattccaactcctc

SEQ ID NO: 2249 - DNA, 2464 bp, Homo sapiens
gttagttcatttgcagagcagagatgcttgattctattttctgtctaatagtaaatccttcccacttcagagttatcaattcacccccatttgtgactacctcatgttcaataagaggaagttacccagtcacaatcggtcccatgctctagtactctaaaccagagggtacttgatccttattttttaacagatgtatccacctcttctatctggcaccatattaatacgaattctttgtttcagagccatcatcaaccactttaaccccaaaattgagtcctacgctgctgtgaatcacatatcccaactgtcagaggagcaggtgctggaggtggtgagagccaactatgacacgctcacgctgaagctgcaggatggcctggaccagtatgagcgctactcagagcagcacaaggaagctgccttcttcaaagagctggttcgatccattagcaccaacgtccggagaaacctggccttccacacactcagccaagaagtcctgctcaaggagttctccactatctcctgaggccacgcctacctgagcagcctctgactgcccttacccatgaggatcatgggctggagggggagcgaggggagagggggctgcccccgaggttggagagaaacacagataccaagttctcttggtgaagaccgcacttcaatggagcttgggcagcaggggcaggagggtcaagccagggataatcttatttggggaggaatgggtgggcacagtggggagaggcctccaggaatgtggggacttccagagtgggctccctaaacagcccctcacatttccaatcttgaggttacaagctgtagctactgactaattttcgggagctggtgaggcaagcctcagggtaatgccagcaccctgaaagtcagtggctctgctcggcttctgaaaacagatcaactctcagatatagctggagctacatcctgcttcctttgggcctggggctgtgcttggcttgaaatctgtgtcccctgcctgcactggcactttgtccagtcatcgggacctttggctcagatttagggtaagataggaatagggtacctttttccttttttttctgagacggagtctcactctgtcgcccaggctggaatgcagtggcgtgatctcggctttactgcagcctccgcttcctgggttcaagcgattctcctgcctcagcctcccgagtagctgggactacaggagcgtgtgccacgcccggctaattttttgtatttttagtagagatggggtttcaccatgttacccaggatggtctcaatatcctgagttcatgatccacccaccttggcctcccaaagtgctgggattacaggcgtgagccaccacacccagccagttttcctattttctgaattcagaattgacttctctgggaaaactggagatgagaatctgcccagtgctctgctgtccagtcaccgccttttgaattttagttttggcaccaggagtaccgttagctttccccttcttctggcccatttgactcatcagcacaatagggtcaccaccttaacttttaatttctaatctgctttactgtctttagggtgtgtatgaaataaacattgacaggctttctggagccctcaaggtgcctactttgctggttccctttccagcagctcccccacctcccttagccccccctcctctggcagcctctcctgcctctgctgagctcccctccacgtgttccacccccttaccctgctgttgtttacatccaacctgcctgagaatttcctctggggaggaatctattcctgtcatggtctagtgcctgggagggagagaactttctgggggtagggtgccctccatctgaaacaggccaggtgagcatcatgcataaggcctccattctgtccgctcagattctgggtggggccacaggcaaatctcctgacttatggggagttggcttgtggttcctcccttggatagcctccatggaaccactataggctttcccaacagctgcctctgaaatagctgctgcttcgagatcctccctttttaaagcactttctaaagccctcaggatggcgggagcgaacagcactggtatattctaggagtaagtgcaggaattcagcagtgagagcatgtctgggaccacctggactgccatccatttaacctcaaatctctttgggatactcgccctccctgggaaccagagttctggctctaacattgagcagctatgcactagttccagagaagccactaacaggctgccatgtgtagatgtaggttcttaagagatcacaggctgggtcatctgatcactggatggatagctcagcctggggcatttagtgttttccctggtgataaatccccaaggcagctggatttggagctggtggcaagttgaaattattaaaaattgatttgtgtgggactgtc

SEQ ID NO: 2250 - DNA, 2117 bp, Homo sapiens
ccttgcttcctgcttcgcctccgcgcctcgcgctatgggacagagcccccgatccgccagcaccacctgaggatccagaaaccgccccagcgatggaagaggatcaggagctggagaggaaagcaatagaagaactgcttaaggaggcaaaacgtgggaaaactagagctgaaacaatgggacccatgggttgcttattacagggacaagatacaaactaaaatcagccaaaataagacacaaagattaaagccactgttatcctctgctccatgaagaggacatgctaccctcccagcatcagtgtgtgataataagcatggaatattgccaagcaaggaagctcatctgcggctcagcattcaaagtttttattgcggtttcattaaataggatgaagtgtcctcttgctagcaccaataaaagatttctaattaacacaattaaaaacacattgccctctcataaagagcaagaccatgaacaaaaagagggcgataaggaaccagccaagagccaggcccagaaagaagaaaacccaaagaaacacagaagccatccttacaagcacagcttccgcgctcgaggttccgccagttactccccgccacgaaagcggagcagccaggacaagtacgaaaagcggtccaaccggcggtgaggctggaaccagggccagccagccctgcgggcctccgtgctccttcggggtgcggtgtgcggagaaggcctgagctggcagggcaaacacctgagagtgactttgacattaggtcctttgttgtttttaaagaggctgctggccacaggcaaaaaaatgacctagcaactcttgaggaaacaagtgcaaaggaggatgtcttggcaagtttaagctacttctgcagtgtagtagacttacatattgttgtttatcttgtttggaagtgtgtttcaaaataaacatgtctagaatttaaagttttcagagattgttaaaactggttccaattttttggtcatttctcagaaaaataaaatacttataaatcctatattttactttttgggggtattacatttaaaatttagaaatcatcagtccagtgaccatatttatgaaaagctgtagccctccaaggtctgggaatttatcgagaagctctttgatagctctgcatttgttttcccttaagtgaacaatgtaggaaatcctcaaagtggctttgaatttaatgctccacttcagttaccagaggttaaaaatgggttttgttgtttcctgtgcattctcaaactcatttattagatagaacaatctttctatatttaatttttttaatatataggtcttaagtggtgctttaaaaagaaccctcacaagttaaaaattaagagttgtttcagtgctagatcttgccagctaaagacttgtgataccactatatagtatagttgttccagaaatcttcattttaaatagaagtgtttacgatgccttttttcccccagtattggttttcaatacctgttttcatatacaattacaaacctttcaaacctgtattccttctttatactcaggaaaatgtcaccaagcaccctcctccccagttcacaaaaggaagaagatgaagattctgtctccctgctccccctccccagttttccaaagtgtctgagcatatgcctggctgtcctcagatcatcaccatgccacatccctgctccctacttcctggcagccaagaaaagccctttctacatgctagaaggaaatacatccaaaaagttagcattggagtgttagaaactagaatagacctctccgccaccgagctgctgtgtcacgccctcagcctgctagggagtgacaagcccaagtcattcttgatccaccccttctcccaccccagatcccagggactcatcctgtgactttgtaaccacactcattcctttcaaacacagaggaggaattattgcttcatctgactttattcaaatctagttatgtattggcctaaattatttgtgcaaaatttgaaatgttttttatttaaatattagaaatagcacaaagtcatggagtttttaaaaattgttataattaagtaaaaataaagctgaattgtgtc

SEQ ID NO: 2251 - DNA, 2119 bp, Homo sapiens
ttaaacccgtctgggtcttgggggcctttgtgcagctcatgacttggcccattacttagagtagttcgtaacacaggtgaagtgttgttagttaccaggcactgttaaagatgctttacatgtagtgacctgtgtaatttctcacattaatccttaatgagatggacaggggaagtggaggacggggcttaaataacgcgcccaggttcacatagcctttatgtgaagcaggactcagagccagactgcctggctccagagccggcactgctctgttgtaacccagctgaaggagtattttaccttgtgactgtagacacagccatccatagatcacacacgtctgtgtgtaacagacaaaatggtgaaaatggctgatttgatttctgattcctgtacagttttctgtcatgcttcactaaatgatttactggtgggttatgtcccacagttaaaaacatggcccaggctctgcttctcactatgggttgagcacttggtgtgggccaggcatgtttttctagtggtcccgattaactgtgaggacatgggaggccagagcaggggttattatcactaacttgggaggggcaggagaggggaccctggcagctggacagaggtgctgactgcagctactctccccaaggtgaaattcatgaaaagcaagccgggggccgccatggtggagatggctgatggctacgctgtagaccgggccattacccacctcaacaacaacttcatgtttgggcagaagctgaatgtctgtgtctccaagcagccagccatcatgcctggtcagtcatacgggttggaagacgggtcttgcagttacaaagacttcagtgaatcccggaacaatcggttctccaccccagagcaggcagccaagaaccgcatccagcaccccagcaacgtgctgcacttcttcaacgccccgctggaggtgaccgaggagaacttctttgagatctgcgatgagctgggagtgaagcggccatcttctgtgaaagtattctcaggcaaaagtgagcgcagctcctctggactgctggagtgggaatccaagagcgatgccctggagactctgggcttcctgaaccattaccagatgaaaaacccaagtgagtatctgtgtgtcctgcaggcatcaacctggtgacctaatgggttggctggcttcaggccagggatgtccttcctgcccttgagataggaccccgggatcttcgcactgttggtgacacaggcaggtgggacctgctcatcaggagagcagcctgtgctcctcatgggagagccagcctgactgcctgctgccactcactctgccagcttgggagttgctcaggcttgtcctccagggaggtggcattctcttctttgcatcagagactggcttaggtaggaaagccactctgttacctaggaaagaggcaacactatccagcaggtaaaacttgcccacccagttgctgggagaggcccattgccttgggctggcgaaggagataggaatgggattctctatgggaatgaaggaagagaaggagaaacgccgtgcataattggtaattggctcatcttgaagcctcacgttgggcagtcactccttagacccctgccgttgacctgcagaaaatgggagatgggtacaaacttgaggggacctgggtttggggagcctccaaagacgggaaccaaccaaacttgtctctcctttgcagatggtccatacccttacactctgaagttgtgtttctccactgctcagcacgcctcctaattaggtgcctaggaagagtcccatctgagcaggaagacatttctctttcctttatgccattttttgtttttgttatttgcaaaagatcttgtattcctttttttttttttttttttttttaaatgctaggtttgtagaggcttacttaaccttaatggaaacgctggaaatctgcagggggagggagaggggaactgttatctcccaagattaaccttcacttttaaaaaattattgtacatgtgatttttttttttcctgttcatacatttgtgctgcccatgtactcttggcacatttcaataaaattgtttggaaaataaacacagc

SEQ ID NO: 2252 - DNA, 2419 bp, Homo sapiens
attgtaggcacaagcaaaggtagccaggtcaccacatctagccaagactgtcagcctgaaaagtgctatattgagagcccttaacatgtatgggggacatatccaggatcttctcaaaacaagccctatcacagagctgctccacgatctaaaaggatcctgtaaataaatgggcaagaggctcttggaagtctcctttactgtcctggggttcacaggatagaagcacacgtctgacttaatctcaaaatcctcaatgctgccccataatggaagagtctgcttacctgtggccaccgtttcagcttttcttcctagatataagcaccaaggaaaatcaatgctggtacatagtaggcattccataaatatttctcgagtggatgagcacatgaatgaatatgaatatgcatgtataaaacatcattttcctcccacactggctgacttcatctgtataaacttattcttgcctgagagctggattccgggagaggctggcacatcccaacacacagcttgctctagcttgcgtggagcctggagggagggtgggaaatgcatgctttcattcttgctgtgccttaagaggagtcaagcccatgggccttgtgactataggcaaaagatgcccagttctgtgtcccggagctctgtcctgtatcctgggagctactgcagcaatctgggcagcatgactgacagcttcttcttgtgccctgtgcctctacaggccgcacccctccttgtccatgtcagttcctttgcagccaccagccataagaagaagctgtatgtgatcgggggagggcccaatgggaaactggccacagacaagactcagtgttatgacccttccaccaacaagtggagtttgaaggcggccatgcccgtggaggctaaatgcatcaatgcagtgagtttccgggaccgcatctatgtcgttggtgagtaatggcttcttattggtctgaatggcttagaacctgatgagcgcctggctgcagcacgtaaacggtgtgtcgcggtgtctccagcgctggcaactcactgcccctaggacccactctggctttcaggagagccatcaatcgactgtttctcttggcaagagggtagacttggcctaatcagaagttgaattttagtggttaagagggaagaaaccagaaaaatggagcgatgcccaccgtgtttcctccctctcctcaggtggggccatgagagcgctgtacgcctacagcccgctggaagacagctggtgcctggtgacccagctcagccacgagcgggccagctgcggtatcgcgccctgcaacaaccggctctacatcaccggcgggcgggacgagaagaacgaggttatcgccacggtgctgtgctgggaccccgaggcccagaaactgacagaggagtgcgtcctgccccggggcgtgtcgcaccacggcagcgtcaccatcagggagtcgtacacccacatccgcaggatcgtgcccggagcagtgtctgtctgacggcaggatggggagctggagagcccccccgaccctcagcgtacccgcctcacctctcaccctcctccagtcccacttcaggcagcaggctcgagtttgaggccatacatcaggggatcccctagactcactttgggggaaccttggaagtcacagtttggggtcacttgagaccggccaggaatgtttgcatgacctacctcaggaggggaggcgaggaagagtaatatttagcattcaggacccacccaccctatgccggcttctgtgccaggcacttccttttatcggttcatttaacctggtgactggctcttatcacttctagtttacaggtgagggaaccaagtttcacagaggctaagtggcgtgcccctgatcactcagatagcaagtagctaccccaggagtctaaaatccaggtctttcatctccgaagtcaatgctctttccaccatgctgcctatctcagagcaggaaaaacaaacaaaaaacaacaacaaaacctggctcgtgctgggcgtggcggctcacgcctgtaatcccagccctatgggaggctgaggcgggcggatgacctgaggtcaggagttcaagaccagcctggccaacatggtgagaccgccccgtctctactaaaaatacaaaaattggccgcgtgcggtggcaggcgcctgtagttccagctactcgggaggctgaggcaggaggatcacttgaacttgggaggtggaggttgcagtgagccgagatcgccacactgcactgcagcctgggaaacaaaagtgaagctctgtctccaaaacaaaaacaaaaacaaagaaacctggctcatttcttgtttcggcaagtctgctaaaagattcactcagcacagcagggaaataaaggtgtttcctgctttc

SEQ ID NO: 2253 - DNA, 2688 bp, Homo sapiens
ttttacaaatgaagaaaccaagtctctgaggggtggagtagctggctaaggtcacacaggaagccacactatgtcccaacacttggaatgatgtcaccagccctgtgctttctttttttcgagatggagtcttgctctgtcgcccaggctggagtgcagtggcacgatcttagctcactgcaagctccgcctcccgggttcacaccattctcctgcctcagcctcccgagtagctgggactacaggtgcccaccaccacacccggctaagttttttgtatttttaatagagtcgggggtttcaccgtattagccaggatggtctcgatctcctgacctcgtgatctgcctgcctcagcctcccaaagtgctgggattacaggcatgagccaccgcaccttgccagccccatgctttctttgtgaccactcccagcctgtttcccaacctcccaccccacagggagtatgaggagtagcagtgatgcctgtgacagaggcaatgccaggcactatgtggtgtgggtaaggggcaggttgtcacaggagctgccatccagcaggtgtcctgacacccaacagggaagctgaggctgggggcctgaccttggtgccctgccctggcccacagccagcccccctggcctgatcttccctggcacccccttgtaccctcagttccggaaccccaaggcatccttgcgtgtgcggctctgtgacctcctgagccacctgcagcggagcggtgagcgggactgccaggagttctaccgagccctgtatatccatgcccagcccctgcacagccgcctgcccagccgccacgctctgcgtaagttccacatcaccaaccatgcatgcttggtgctggcccggggagggcaccccagcctgccgttgatggcatggatgtcctccatgaccacccaagtctgctgcagcccaggcctggcatcccctctcgcctcagcccctccccagaggccaccctctggccccgaggggagagtgtggcaggcacaggcagtgcagatgttggtctctgtctcccactttctcccccttcctccgtctctctctcatggcagttttcacacagcatggggcatcttatacgtccactcttgcccttccttttctaacctcattccacggggatcccttcatgtctgtgtggacagcaaccttgttcccacagctgcatggcgctcctaggcggtcccagctggaattacccaaccccatgacggaccctttcattgcagcgatctgcacacgtgtgggtgtttccataggacattgtcaggcacggatggctggtccgaagcacgtgcatttcagttttgaggctcctgtcctcaggcagtgtggactcaggccctgggagtcatgtggatgccagtagcctgggcccacagagctgctgggatgtggggggcatatcaagttgaagatggcaactctaatctgacgcctctgtgctcagggcccctggaggaggggctactgccccttggcccttagacaacaggacagagaccagagggactgggcggcttgtcccaggctactgggctgtggtctctgaccccctggaggcctccccacgcctcacagaacacagtgcagacggtgggcggggagagctcgaggggaggcccagccctgcaggtgggactggctctccctccccagccacgagtatgccacagggggctttcaaaaccaggcagggccaagccttggccccactggaggtagagcaccttctgtggctcccgggtgcctttaggcccgtccaggagttggagcagaggagaagacccagactgtgcatagttccctgaggagggctagcctcaggtgccacagcctggttcggcctggcggccccaggaggcagcagcaaccttgggcttcctgcggggtgactaccttgccctccggccctgcccgttgactaactatgctctgtggttttgtttccagagaactcagattgcacagagctagactcgggcagccagagcggcgagctgagtaacaggggtaacacctccctgctgcccctccctctctctccctctctctccctctctctttaccctccccagggctccatctccgcctcaggggcttctccaccccaagtctggctccattcctggccttctgttggtgacagacccccccctaaggtgctcgtttgggggctcttcaggcagcacctcagcctggcacccccactcccctgcgcagcccccaggcctcaggaccccacccctctgaggcccaggggagccctgttcacgctggtttctccccaggacccatgagcttcctggctggcctgggccttgctgtgggactggccctgctcctgtactgctatccgccagaccccaagggcctgccagggacccggcgcgtcctcggtttctcgcctgtcatcatcgacagacatgtcagccgctacctgctggccttcctggcagatgacctaggggggctctgacagaccctggacccagggcctcacctgccactcaaccaaagagtcctcgagccggcccgccaaggggactgctgcttctttttctaaatgcatatttttcattatttataatttgtgtaaaaaacacaccttcaccttacaaggtgctgaccatattaaatgttcaggttctctc

SEQ ID NO: 2254 - DNA, 2218 bp, Homo sapiens
gtatgcagagtggtgggataggagacatacaagaactaagggaacatacagcaggggaactaatccagtctaaagatcagttcttttccttttctggagaccaagctgccttggtcactctctgctggtcttatggtggtttaggccctgtctagctcaagagtatcttagtggtaggctctaaaggggggataggttccagataagccaggaatgagtgatagaagaggtccttcccctttccccatacgaatgcatctgcacctttgtgtggggatacacgtgcgtgcacacacacaaacacacacacagtgcttcacctggtatctcctcatcgcctattatgtggctagggggccctgcattccctggcacaccagggttgtcccgctggcttgggtggtcaacacgaatagagaggacccgtagcaggggcagtgctcgcacgatagcacgtgtcagctccaggatgggcagtggtgagaacaggtcactgagatgcagggcacggaggcgacatccagcctggcctgacagggcccgcaggctgtctagcaggcggaagatgttagagcccaggcctatggcaagaaagagattaagtcagaaccatgtgggagtgtcagcaggggtaatatattcaaatacaactccaaatacttttggttactagcaaatctcttgggctttggctcagcttatttaaacccatttgtcttaactactcatccatgtcttgctttttccttaggtaaccagcaaactgaggtctgctgttttgggttgtgcccacaagaagcaccagtcagggcagagtcacaaaactgagaagatacaatatggtgaggcagcatgtggctactagctgaatgacaggcacagacagtagcagttctctggatttctgggttctgagtagttttctgaagaaactggccttgaaggaaggaagttttggatagagggagaagacatagtcaagagtcccagctagccgggagcggtggctcacgcctgtaatcccggcactttgggaggccaaggtgggcggatcacttgaggccaggagttccagaccagcctggccaacatggtggaaccctgtctctactgaaaatacagaaattagctgggctgggtggcacatgcctgtagtcccagctactcgggaggctgaggcaggagaatcacttgaacccaggagacggaggttgcagtgagctgagatcacgccactgcactccggcttaggtgaaaaagcaagactgtctcaaaaaaaaaaaaaaaatcacagctaggagagtgcaaggcatgaatgagacgcttgcttgtttggctacatgaggctcaggaaacagctctagagggcagggcactggaggccacattatggaaaggcaaagggatggtttaacctagacgcaatagggagcacctaaaaactatggagagtgacagtgacccaactgggatacttaaaagaatcaatgggtgggaatggggcaggaaaagataaccaaatcccacagcatggactaggatccaggaaggttggttgcttaatgccacaggcaaataattccttggactatgcaggctcctgttcattcattcaactacccagtgcctactaaatatcaagttttttgctagacactagtgagcagcacattgcttttttttcttacatagcttgataatgcgatgggaactgggggaataaagtactatgaaattacaaaggatgagtacctagtccagcttacatcagtaaaggcactccagctaagtcctaaagaacataaaggggacaggctaaaatttaggaagaatgattgtggcagaggcaacttggcatatgtagaggcctgaaggagaacaaaaaaatttcataatggctggtgtgagagtgtgaaggggggaagcattcaagatacaactataggccaggtgtggtggctcacacctatataatcccagcactttgggaggctgaggtaggcagatcacctgaggtcgggagcccaagaccagcctggccaacatagtgaaaccccgtctctactaaaaatacaaaaattagctgggcatggtggcatgtgcctgtaatcccagctactgagtcagtagaattgcttggacccgagaggcggaggttgcagtaagccaagattgcaccattgcactccagcctgggtgacaacagagactccctgtc

SEQ ID NO: 2255 - DNA, 2935 bp, Homo sapiens
attttttttcagtgtgaggggcatggaatgaggtttcaccatgctgctcaggctggtcttgaactcctgggctcaacctgcctgcctgcctcaggccttgcagagtgctgcgagtacaggtgtaagccactgtggccggccaatcctggagaagttcgtacccctctgagcctccacttcctcacctctatgatgggctagtggctgcccccacctacagggttgtgagaattacatggaatgagacatgcatcatgtcctgggtagtgcttggtaggtagccctcgttattgttacataatgaagcactgagcagttactgaacacctgctgtgggcccaacactgtgccgggccttgtggatgaggccaacctgggaccagaacagcctttggcctcaggaggctcacagtctaaggagtagaggggcgcatgtgaggatgacacccccgtaccccgcccacacccagaattgccgtggaaagtttgctttgggggattcagggagcctggcctcacctggccctatctagagtcgagaggaggtctctaggctgagggcaatccctgtgcccctcctgcaggacagctaacccccgcatcggtgacgtgatccagaagctggcccccttcctgaagatgtacagtgagtatgtcaagaactttgagcgagcggctgagctgctggccacctggaccgacaagtctccactcttccaggaggttctcactcgcatccagagcagcgaggcttcgggcagcctgaccctgcagcaccacatgctggaaccagtgcagagaattccacgttacgagctgctgctcaaggagtacatccagaagctgccagcccaggccccagaccaggccgatgcccagaaagccctggacatgatcttctcagctgcccagcactccaatgcagccatcactgagatggagcggctgcaggacctgtgggaggtgtaccagcgcctgggcctcgaggacgacatagtagacccctctaacaccctgctccgtgagggcccggtcctcaagatctccttccgccgcaacgaccccatggagcgctaccttttctttcaacaacatgctgctctactgtgtgcccagggtgatccaggtgggcgcccagttccaggtgaggacccgcatcgatgtggccgggatgaaggtgcgggagctgatggatgctgagtttccccactccttcctggtgtctgggaagcagcgcaccctggagctgcaagcccggtcccaggaggaaatgatttcctggatgcaggccttccaagcagccattgaccaaatcgagaagcggaatgaaaccttcaaggctgcggcccaggggcctgagggagacatccaggagcaggagctgcagtctgaggagctgggcctccgggcaccgcagtgggtccgggacaagatggtgaccatgtgcatgcgctgccaggagcccttcaacgctctgacgcgccgtcgccaccactgccgggcctgcggctatgtggtgtgtgccaggtgctccgactaccgggccgaactgaaatacgacgacaacaggcccaaccgagtctgcctccactgctacgcattcctcactggaaatgtgctgcctgaggccaaggaggacaagaggcggggcatcctggagaaagggtcctcagccacgcctgaccagagcctgatgtgcagcttcctgcagctcatcggggacaagtggggcaagagcggcccccggggctggtgtgtgatccctcgggatgaccccctcgtgctctatgtctatgctgcccctcaggacatgagggctcacacctccatccccctgctgggctaccaggtgactgttgggccccagggggaccctcgggtcttccagctacagcagtcaggccagctctacaccttcaaggccgagacggaggagctgaagggccgctgggtgaaggccatggagcgggcggccagtggctggagccccagctggcccaacgatggggacctgtccgactgagccactgccagccgctctcctgcccacctctccccaccctgaacccagctcctgccacagactgaccctgtggcctcagtgacccactgccccaagtggtgctttcagagaattgattcagccatctgcgcccaggccacgtgtcccgatctgggattagaaaatatgggtccattcctttctagaaaggggacaaccaagtgtctcagtttgccttgcggggagggggctcctgggccatgggacttccagtgctaaaactgggaaagccccaggtaaccccggactggtggtcaccatagtatggtttttcatttgtatctcctggggagcttttaaagagtactggtgaaaaacacatagtaaattaattttaaaaatgtaaaaaacaatgcctgtactgaagtaccaccaccgatttaaatgggctgagttgggggaggcatggggtctttttttttttttttttttttttgagacagagtcttactctgtttcccaggctggagtgcacaaacatggctcactacagcctcgctctcccgggctccagtgatcctcccgcctcagcctcccaagtagctgggattataggtgtgtgccactgtgccaagctaatttttttattttttgtagagatgggatttcaccatgttactcaggctggtctcaaactcccagcctcaagcgatgctcccacctccacctcccaaagtgctgggattacaggcgtgagccaccatacctggcgcatgcatattttttaagagtacccactggagtctaatatatagcctgggttacctgggatgaagaataaagagagcaaactaccacaagcaatggttgagcccctgtcaagtgccagtcatgatagtagtaataataataataaacatctattgggccagg

SEQ ID NO: 2256 - DNA, 2505 bp, Homo sapiens
cttctcttctcccccatccctcttccctgcctccctcctgccggccttgaggcccctgaggagcagtggagaggccaggtgtcttctctgcccagcgctttctgtgacttctttgagtggctacaggttgagggttgactgtgcgggcgattgcagcgtggccctttcacctctttgcacactgccacatgctgccacaggatggcagtgcaggtctggctctgtttctctgtttggtgccctctatcgatcgtcgtgaggcttgggatgggcctagattgtgagcagcatgggtgccaaggccagggcaggagctggcatggggcctgtgtgggccattgtggtaggaagcctggcagtcgactggcccagaggatcccaggctgctttccttcttgaggctggtggcaggagggctgctgacggaaggctgtttctggtagtgatggtgaaatctggccaaggatgccgtctggaggcaggtagcagcttggctgtgagtggcagctgtcaggcatgtgcaagtctgcgtgggcgaacagaggcaggcaaggacaggctgggcattctgcagctgaagccggagcagccgctgaccagtctggatggttggacccaggcggggccagctgccttcttgcgccgccgttctcactgcatcttccgctctggcccaaagccacatgggagggtctgggagggagagactcggaggaggaggaggagggagtcggggcgatggctctcctcacagcgtggccctcagcagcagaggcaggtcatcttcctgagcgtttgtggcgctcctcttaaagataatgtccgagttttctttacatacctgtagctgtttttacttttctgtttttgaagtcagtttgtgtcttgacgtgtcccttgcaatatccctatcgttatatatgctgtgtgccttatgaaatgctgggatctggaaaatccaaccaaccaacccaccggctcctcaccgtctccacctctgcctttgactgacacctcaatctgtcaatcggaaccgcctaccatgcgattggtcggatggcgtttcggggggcggtgcatgcagagaagccaacagagcagtaagcgcagcagccggagtgtggaagatgacaaggagggtcacctggtgtgccggatcggcgattggctccaagagcgatatgagattgtggggaacctgggtgaaggcacctttggcaaggtggtggagtgcttggaccatgccagagggaagtctcaggttgccctgaagatcatccgcaacgtgggcaagtaccgggaggctgcccggctagaaatcaacgtgctcaaaaaaatcaaggagaaggacaaagaaaacaagttcctgtgtgtcttgatgtctgactggttcaacttccacggtcacatgtgcatcgcctttgagctcctgggcaagaacacctttgagttcctgaaggagaataacttccagccttaccccctaccacatgtccggcacatggcctaccagctctgccacgcccttagatttctgcatgagaatcagctgacccatacagacttgaaaccagagaacatcctgtttgtgaattctgagtttgaaaccctctacaatgagcacaagagctgtgaggagaagtcagtgaagaacaccagcatccgagtggctgactttggcagtgccacatttgaccatgagcaccacaccaccattgtggccacccgtcactatcgcccgcctgaggtgatccttgagctgggctgggcacagccctgtgacgtctggagcattggctgcattctctttgagtactaccggggcttcacactcttccagacccacgaaaaccgagagcacctggtgatgatggagaagatcctagggcccatcccatcacacatgatccaccgtaccaggaagcagaaatatttctacaaagggggcctagtttgggatgagaacagctctgacggccggtatgtgaaggagaactgcaaacctctgaagagttacatgctccaagactccctggagcacgtgcagctgtttgacctgatgaggaggatgttagaatttgaccctgcccagcgcatcacactggccgaggccctgctgcaccccttctttgctggcctgacccctgaggagcggtccttccacaccagccgcaacccaagcagatgacaggcacaggccaccgcatgaggagatggagggcgggactgggccgcccagccccttgactccagcctcgaccgccaggccccaggccagagccacccaatgaacagtgcaatgtgaaggaaggcaggagcctgcaggggagcagacttggtgcccagctgccagaaagcacagatttgacccaagctatttatatgttataaagttataataaagtgtttcttactgtttgtaacccctggtaccagtgtgtccatctccaggctccttgccttccccttacctgaccttattaataaagtctttcttagcagttc

SEQ ID NO: 2257 - DNA, 2570 bp, Homo sapiens
caggagatgatccggcaactggaacagacaaactatcgactgaagttgtgtgtgtctgaccgcgatgtcctgcctggcacctgtgtctggtctattgctagtgagctcatcgaaaagaggttggctagaaggccacggggtgggtgcgtggatgcatgaagccctgccctggggtccagatactgggcatctcctcctagctgtgcactgtccagcctgggcacagtgggcccttcctgaagctattcccaggggatatgctgaactaagttgccacaggacctgcagcctgcccactctcccctaggtgccgccggatggtggtggttgtctctgatgattacctgcagagcaaggaatgtgacttccagaccaaatttgcactcagcctctctccaggtaagctcaaccctgctctggcaagagaatgagggaatgtgtaggtggggcctctggattgtcagccttccctccccaaggactgtggatgcagtaccaaagaactgctgaagatctctgcacacctgagcatgtgtgcatgtgtgtgcctttttgtgtgagtgaatgtgtgccaggggtacttagatgggggatggctgttgttaaccctggggttgaagactgggcttgtcccaccatggggcaagggcctgatgccagcatggcaccccttggcttgcaggtgcccatcagaagcgactgatccccatcaagtacaaggcaatgaagaaagagttccccagcatcctgaggttcatcactgtctgcgactacaccaacccctgcaccaaatcttggttctggactcgccttgccaaggccttgtccctgccctgaagactgttctgaggccctgggtgtgtgtgtatctgtctgcctgtccatgtacttctgccctgcctcctcctttcgttgtaggaggaatctgtgctctacttacctctcaattcctggagatgccaacttcacagacacgtctgcagcagctggacatcacatttcatgtcctgcatggaaccagtggctgtgagtggcatgtccacttgctggattatcagccaggacactatagaacaggaccagctgagactaagaaggaccagcagagccagctcagctctgagccattcacacatcttcaccctcagtttcctcacttgaggagtgggatggggagaacagagagtagctgtgtttgaatccctgtaggaaatggtgaagcatagctctgggtctcctgggggagaccaggcttggctgcgggagagctggctgttgctggactacatgctggccactgctgtgaccacgacactgctggggcagcttcttccacagtgatgcctactgatgcttcagtgcctctgcacaccgcccattccacttcctccttccccacagggcaggtggggaagcagtttggcccagcccaaggagaccccaccttgagccttatttcctaatgggtccacctctcatctgcatctttcacacctcccagcttctgcccaaccttcagcagtgacaagtccccaagagactcgcctgagcagcttgggctgcttttcatttccacctgtcaggatgcctgtggtcatgctctcagctccacctggcatgagaagggatcctggcctctggcatattcatcaagtatgagttctggggatgagtcactgtaatgatgtgagcagggagccttcctccctgggccacctgcagagagctttcccaccaactttgtaccttgattgccttacaaagttatttgtttacaaacagcgaccatataaaagcctcctgccccaaagcttgtgggcacatgggcacatacagactcacatacagacacacacatatatgtacagacatgtactctcacacacacaggcaccagcatacacacgtttttctaggtacagctcccaggaacagctaggtgggaaagtcccatcactgagggagcctaaccatgtccctgaacaaaaattgggcactcatctattccttttctcttgtgtccctactcattgaaaccaaactctggaaaggacccaatgtaccagtatttatacctctaatgaagcacagagagaggaagagagctgcttaaactcacacaacaatgaactgcagacacagctgttctctccctctctccttcccagagcaatttatactttaccctcaggctgtcctctggggagaaggtgccatggtcttaggtgtctgtgccccaggacagaccctaggaccctaaatccaatagaaaatgcatatctttgctccactttcagccaggctggagcaaggtaccttttcttaggatcttgggagggaatggatgcccctctctgcatgatcttgttgaggcatttagctgccatgcacctgtccccctttaatactgggcattttaaagccatctcaagaggcatcttctacatgttttgtacgcattaaaataatttcaaagatatctgagaaaagccgatatttgccattcttcctatatcctggaatatatcttgcatcctgagtttataataataaataatattctaccttgg

SEQ ID NO: 2258 - DNA, 2052 bp, Homo sapiens
acaattaggaaagatagtctccaacaaagagtgcaggaataatgaatatccacatgccaaaaaaatgaatctagacccaaaccatatacccttcacaaaaattaagtcaaaatggattacagacctaaacataaaatgcaaaactagaaaactcctagaaaataacacaggagaaaatctaggtgaccttggggatgttgatggctttttagatacagcagcacaaaaggcatggtcaatgaaagaaagaactgataggcgaaacttaaaaaaactgctgctctgtgaaagatactgtcaagagaacgagaagacaagccacagatgggaaaaactattagcaaaagcaggatctgaaaaaggactattatccaaaatatactaaaaattcttaaagttcaacaataagaaaacaaacaacttggtttaaaaaagggcaaaagacctgaatagacaccttaccaaagaagatatacagatagcaaataagtatatgaaaagatgctcatatgtcatcagggaattacaaatttaaaacaatgacataccactacacacctattagatgggcccaaacccaaaagattgacaacattaaatactggcataaatatggagcaacaggaactctcattcattgatggtgggaatgcaaaatagtatagccactttggaagacagtttggcagtttcctaccaaagcaaacatacttttaccatgtgatccagccatcatgctccttggcatttacgtaaatgaaatgaaatcttatgtctacacaaaaacctgtacatagatatttacagcagatttattcataactgccaaaatttggaagcaaccaagatgctcttcagtaggtgaatggataaactgtgggtcatccagacaatggatattattcatcactaaaaagaaatgagctatcaaggcataaaaagacctaccagaaacttaaattgcatattattaagtgcaagaagcctatatgaaaagataacatactatatgatttcaactagataacattttagaaaaggcaaaactatggagacagtaaaaagatcactggttgccaggggtcagtgtggagggaaggatgaataggtagagcacaggggatattttgggcagtgaaactattccttatgatactacaatcatagatgcatgtcattatacatttgcccaaacccacagaatgcacaacacaaagaatgaaccataatgtggactatggaatttgggttctaataatgtgtcagtgtaggttcttcgattgtaacaaaggtaacactctggtgggggatgttgacaatgggggaggctgtgcatgtgcggggacaggggtatatggaaactgtatactttctgctcaatttcattgtgaatctaaaactgctttgaaaaacaaagtctattaagtcagtcagttaatccttcactacttcaccatctccttcaccttacggtgaaatcaaagtaacaaacagggctgcaaggccctatgcaatctggcctccttccccattcctgcctccctccctcctgcttactttgctccagccatgctggcctccttgccagccagaatgccaggcacactgcacctctgggcctttgcacttgctgtgctctctcccaggaacattcttccctgagagagcctccctggttccctgccatcttccttcaggtctttattcaaatgtcaccttcttcgtgaggtcttccccatcactctaattaaaaatgcagctttagctgtgcacagtggctcacacctgtaatcctagtgctttgggaggccaaggcaggaggatcgcttgagtccaggagttcaagacaagcctgggcaacacagcgagaccacgcctctcctaaaaacttttaaaaattagcagggcatggaggcacgtgcctgtagtcccagctgcttaggaggctgaggcaggagatcacttcagcctggaagttcaaggctgcagtgagctatgatcacactactacacaccagcctgggcgacagagtgagaccctgtctctaaatt

SEQ ID NO: 2259 - DNA, 2150 bp, Homo sapiens
ttgttctcctcacagcaggttcaggagaagtggcacctggtggaggacctgtcgcgactgctgccggagccaggcccgagcgactctccgggccccaagtaccctgcctcccaagcttcgcgcccgcagtccttctgccccggatgcccatgccctggctccccgggccaccaggccccgcggccgggcccctccgtcgtggatgccgcgggactgcgttccccttgccctggacagcacggtgccccggcctccgcccgcagattccgcttccccagcggcgcggagctgtaaccccgacccctgcctccccgaagcctccctggggccccttcaggcctccttactccatcttccagacccctggcgaccaccgcccctctcagtggctccagggcctccctcagaggtccccaaagatggacacacaaccccaggggcagcaggaaaaacatatgggaattttctttctatattttaatctcatccctttaaaatgtctattttttattgtgttttttataatatacataatctattagtatagtatctcttgaatgcgattttttctagaatgtgttctgctgatttgttttagagccatgagtgcaatttatacacatacatctattgggaatgctcagaagttgtttactgatggaagtgccttcagaagagtccgggaaccacttcctaaggaaggaaagagctggccacagttagagcaagcctgcctggggccctgctctgtgttccagctgcaaactgcctgcatcatcccttcctgttactcttccttcacctgagacagtcgaggccacagcgtcagccagggccagagctgggatttgaacccaggcactcgggctccagagccacactgccccagtgtggggcttagtggcggctcctggccctgactgaggggctgactgaagcctggtgagagcgtgctgggtcagcctctccctggcgggaatcctctccgtccagtcttctaacctagcagcctcacgtccacagagctgccttgtgaaactcagcagagccctggcttcctgcagagccgtgttctcccagcctgcttcatggctccctggttgagccaagcttgcggatccgtggggtgaaggtacccgcaccgcctgggccttagtggtatgtacgggcctgcatcgtgagcagcgggcgggggcccaggcaggtgaggcagctggccacaagggcagggcccggcccccctcccaaggctgtgtctcatattcttgagcctgttcgagtttccttttccaagcctcctgttctcccacccccacccctgccatgctgcagtgactaaatctgtggttctcatccttggagaacacctgagtagctgctacaagctggccacagcccagcgactctgatgtggttgggctgggtgtggccagcagccagggcatcgggacttttcgaagctcccaggtgactcaccggcagctggggatgagaactgtcaggagggaaggtcagaagtcccaggatgcacttgaaaagcctctagctccaccagtgaccagctcctggctggactcctggtctggactcagcatcagggaggctctggcctctcgccctcagggctgggggcttcttcacatggtcatcaaagacttggccagttccgcctctcccgcggccgtccttgtctcacccagcatcacgacgcatcagttcaccaacaaacacgattcagtgctgctagtgctgggtcctgttctgggggctggtgatgaggccaagagggaaagagggagctctgtgttccatcgagggggcgacaagcctggaccagatgaaagtgactcatgttgttaattagcggcttagggccaaaggtggcccctggaccagtggcctcagcatcacctgggaaaaggttagaaatgaacattcccaggccccacctcagcctcctgaatcagagcatccctttggcaaaccatactgagaaacaaccacgtgcatcaccaagcgctgtgaagaaggcaagctttgagaccttgaaggaatcatcaaactctgggcctcggtgtgctcacccagggcgagacaaagacgccatgctcctccaagtggcctccaagattaaatgagcaatgactttt

SEQ ID NO: 2260 - DNA, 2479 bp, Homo sapiens
ctgacccccacgcagatgacagctacagccacacaatccccatccatggggtctcccagcctgaaaccctgatgtgtcagtcaaaaggatgaccaccaggcttgcagccagcttgggacatgagccgcgctccttcaatgtccttggggagggcccctgggctcacacctttgaccctagccctctgtgtggatgctacccttggaaccttatctcacgcaaacaagtgcagttcctcagatgtcacatttcatgtgccacagccccacacacaagccccagggactcctcccatgggcccctttccatcaggcctctgtgagtctataccccatcagcccctggcccagtgagtctgtctgtccgcccacctgcccaggtggcgcctcatgttggtttcctgctggaaatgcttgggacagggtggaactgggtttcctgggctttggggctggaggtgtctctattgcggtccctggcttcccactgagctgtgggcaaggctgctgcgctgggggatggctggggcacggagcgaggttccctgctaagctgcgcgctttcccccaggtgatccgcaggggctggctgaccatcaacaacatcagcctgatgaaaggcggctccaaggagtactggtttgtgctgactgccgagtcactgtcctggtacaaggatgaggaggagaaagagaagaagtacatgctgcctctggacaacctcaagatccgtgatgtggagaagggcttcatgtccaacaagcacgtcttcgccatcttcaacacggagcagagaaacgtctacaaggacctgcggcagatcgagctggcctgtgactcccaggaagacgtggacagctggaaggcctcgttcctccgagctggcgtctaccccgagaaggaccaggcagaaaacgaggatggggcccaggagaacaccttctccatggacccccaactggagcggcaggtggagaccattcgcaacctggtggactcatacgtggccatcatcaacaagtccatccgcgacctcatgccaaagaccatcatgcacctcatgatcaacaatacgaaggccttcatccaccacgagctgctggcctacctatactcctcggcagaccagagcagcctcatggaggagtcggctgaccaggcacagcggcgggacgacatgctgcgcatgtaccatgccctcaaggaggcgctcaacatcatcggtgacatcagcaccagcactgtgtccacgcctgtacccccgcctgtcgatgacacctggctccagagcgccagcagccacagccccactccacagcgccgaccggtgtccagcatacacccccctggccggcccccagcagtgaggggccccactccagggccccccctgattcctgttcccgtgggggcagcagcctccttctcggcgcccccaatcccatcccggcctggaccccagagcgtgtttgccaacagtgacctcttcccagccccgcctcagatcccatctcggccagttcggatccccccagggattcccccaggagtgcccagaagaccccctgctgcgcccagccggcccaccattatccgcccagccgagccatccctgctcgacttggcctcgaggggggcgtgctctcgggggggcctcacgcacccgcggcgcaggagcttcagtggtctggggccctccgccgcccctatgctgggaccaggctcccagtgggcagccctggcctcttccttaacgctggccccggtccagggccggcccctgtgcctggctggacaccgcactgcgcaaaggggccctggagctccaggcagggggcgctggggtgttgcactttgggggatggagtctcagggtggcagaggggggaccagaacccttgacaccatcctgaatgaggggtccagcctgggggggactctaccaaggtcttcttgggctgggaaagcccatgtagggcaggccttctataagtgcgggcaccaagggcgcctacatccccaggccttgctggggtgcaggggtatatcaacttcccattagcaggagctccccagcggcaagcctggcccagtgggctcggtagtgcccagctggcaggcctgaggtgtacatagtccttcccggccatattaaccacacagcctgagcctggcccagcctcggctgccagaggtgcctttgctaggcccggagccgttggcccgggccggccttgccctattcctctcctcctcctcctcctgggtcccccagggtggctgggcttgggctatgtgggtggtggtggcggggggtcttgggggcctctcagctcccgcccatgcctccctgatgggtgggcccagggcggcctctctctgaggagacctcacccactcctcgctcagtttgaccactgtaagtgcctgcactctgtattctattaataaactaaaataaagggaagacgctgctggtg

SEQ ID NO: 2261 - DNA, 2186 bp, Homo sapiens
agagcttgtagcttgtcctttaaaaccaggacggccaagtgaaaagtcagtacagagtcttatttttactattaaacaaatcaaagggacacactgggcattgaactactatgctttttcttctttctagagatgacatacgtgttttctgataagtaatgtaccacacattgcactaaagcaaagcagcaaacagccagtaaagctgtgccctgcctgctgctcctgccgggctggaccagtggaacaccatctcggtaggagaggaagaaaatgcagagtccctaacccagagagcctaacaaactggtttataccgaagtgatcttcagcaaacacgcaaacacactaacatgctgtaagaatgttttagtctatttctagcacacagcataaattcgtaggtgcccagtcaaataggaaggaacgccattgtagaaagcatttttgccttcacagcactaacacctaaaaagcacacggcatatagtactttgatctttaagtggataagcatggaagtcccaagatcatatccactagattagcctgagtattcatctataaaaatatatatttttaaaataatgcttaaaagagacttctagaaacagtgggactacatcaggagcagaagacagcgacacaaggactgcaaatgttaagactaggagtggcttttcacgtggaacttttatgtagaggacgtctctttctgttgattgctacagccgagacaagctgtgatcacaggagattctgaaatctcaagctgggcttgagtaacaccctagatagacatcaggaaccccattgaggctgaagtactgaaactgacccatgtgaagaagagataaagagatgcagatgcgcaaagattcacgcagagcctgctgggacagagggtggcggcgggttcatccacacgtccacaccagcgtgtgtgcttgggtggcggcggcgggttcatccacaccagcgtgtgtgctcgggtggcggcggcgggttcgtccacacgtccacaccagcgtgtgtgctcgggtggcggcggcgggttcgtccacaccagcgtgtgctcgggtggcggcggcgggttcgtccacaccagcgtgtgtgctcgggtggcggcggcgggttcgtccacaccagcgtgtgtgctcgggtggcggcggcgggttcgtccacaccagcgtgtgtgctcgggtggcggcggcgggttcgtccacaccagcgtgtgtgctcgggtggcggcggcgggttcgtccacaccagcgtgtgtgctcgggtggcggcggcgggttcgtccacaccagcgtgtgtgctcggggaaggaccccccaagtggagtgctggacatgggctcgctccagaggcgtctgactcagaagctcctgagagaagtgtctccttgaggaggggaggaatactacggttaatgaatacaagaaggtgtttcaggagaaataggtctaggagggttaagtcattttggttttgacctgtcaatacttaacataaatgaagaattacaaaacagagtcagtctttttccaagatgtattctgtcatcatgagctgagcctgttgggctggtgacatccagaatgttccaattcattggctggagggaggacccagtgccgcagattgttctgggaagctggcacagaagatgattgacacaacgaagtcaccactaagccactgcttaagtctagtcctcggccttctttttctgctctgtagtccaaaaccgtgaacgtagcagcatgtcgaatatgtcaccagctgcttcatttttatggtgctgtaatgtggtggtgaaagctgctatgttgaatccagaaatccgctccagcagctgttcttcaatatatttttctaccaaaaaaatgtatgcaggctgggtgcggtggctcacgcctgtaatcccagcactttgggaggctgtggccggcagatcacctgtggttggagggttcgagaccagatgaccaacacggagaaactacatctctactaaaaatacaatattattagcggggtgtggtggtgcgtgcctgtaatcccagctactcaggaggctgaagcaggagaattgtttgaacccacatggcggagactgcggtgagctgataccgcgtcattgcactccagcctgggcaacaagagcaaaactccgtctc

SEQ ID NO: 2262 - DNA, 2496 bp, Homo sapiens
atcaggtttacaggcatgagccaccatgcctggttcagcatgtcatattctaagcaatacgaaaagaatgaaggccaggtgcagaggctcatgcctgtaatttcagcactttgggagtcaaggtgggtggatcacttgaggtcaggagtttgagaccagcctggccaacatggtaaaaccccatctccactaaaaacacaaaaattagctgggcgtggtggtgtgtactcataatcccagctactcaggaggctgaggtaggtggattgcatgaacccaggaggcccaagttgcagcgagccaagactgcaccactgcactccagcctgggtgacagaacaagactccatctcaacacgaagtcgcttaagaccgaggacagcagacattctgatgttttccacattgacagcactcataaggcctttctccagtatgaactctcctgtgtttaacgagacgggatgcttcagcaaacgatttcccatattcactgcactcataaggcctttctcctgtgtgaactctgatgatgaaggagggtagagcttcgctgaaatgtttttccacatttggtgcattcatggggcctttctccagtgtgaattctcctgtgtttaatgagactggaacattcagaaaaggattttccacattcactgcacttataaggcttttgtccagaatgaactcttttatgaacatgaagcgcagagctggaaagaaatgatttcccacattcactgcattcatacggcctttctccagtgtgaatcctctgatgtatagtcacgctgtgcttattgccaaataatttcccacatacctcacacgcatatggcctttctccagtgtgaactctctcatgaacgagaagatgatacttcctgttaaataatttcccacattccctacaattgtaaggtctttccccagtgtgaagtctctggtgttcagtgaggtgggatctgtacctaaatgatttcccacattccttgcactcatggggcctttctccagtgtgacctcgctgatggtgaacgaggttgcccttttgaccaaaagatttcccacattctccacacttgtaaggcctttctccagtgtgaacacgctgatggttaataaagcagaacttctgacgaaaagatttcccacattccccacagtgataagctctctctccagtgtgaccttgctgatgttgaatgaggttacccttttgaccgggggatttcccacattctctacactcgtaaggcccttctccagtgtgaacaagctgatggctaataaggctgcccttctgactaaaagatttcccgcactcctcacagggataagctgtctgtccagtgtggactcgctgatgttgaataaggctgctctttcgactataagatttcccacactctccacaatcataaggtccttttgcagtgtgatctcgctgatgattactgaagctgacatatctgctaaaggattttccacaatcactgcacacataacatccatctctagtgaaaagtttctggtgtggaataactgagtgtttggtgctgaaggcttttgtgcgttttccacaactgtaattagtttttccctcctgaaagggtgggccatgcatagtttcactgtctgtcttctctacagcagcttcttcttggcacaatcctgaactgggcagaacgtccttcccaaactcgcggaagacaaatggctcctgtgacaccctgagcttacgtttctttacaaacgatgcttctctgacactctttctgtagaatttctctccaatatgctgcttctggtgctgatgaaggtatgcagtgtcatccaagttttttccacatgctccactcctgttcagcttctgcttgtgatgagtttcctggtggtcagcaaagtgaaaaacatcctccaagatgaggccacacatttcacaggggtgagccttcttaggagaaacacctgccctaggagtcctgctctgagactctctttgtacagaaattctctgcttacaaggtgcctcctcatcttttgatccacaccaacaacctgaaagcaagaaaatgctggtcaagtgcaaagtacctccggcgggaaggcacagcccacccacaagtacgtctcacaaattgaggaattaatctatagaaatatttgcaggaacacaatgttggcttcaagttgaagatggggctgctggctgggcatggtggctcacacctgtaatcccagcactttgggaggctgaggcgggtggatcacctgaggtcagaagttcaagaccagcatgaacaacatggtgaaaccccatctctactaaaaatacaaaaattagctggatgtggttgtggacacctgtaatcccagctactcgggaggctaaagcaggagaatcatttgaacccagaaggcagaggtttgtagtgagcagtgattacgccactgcaccccagcctggacaacagagtgagactcaatcac

SEQ ID NO: 2263 - DNA, 2087 bp, Homo sapiens
attcaacccttcttgcgccagaccatcggcacccgtgagtgaccccctcctgccacatatggtgctccctagtggtctccctccctcatcccggtgtggccatggccagcccccagtgctcccagcccataaaggagaatgtaagagaaagaaaggggctcaagtgatcacccaggcccatatccatgctgtacagatcaggaaacgggtccagcgaagggccagtgcctcaccacagcctgccctgagagcaggagctgggaacagaaccagggcctcctgtccacattcaggtccacactcaggtcatcaagatcattccttaggggcatctgttgcatgccctgtgtcatgctgggtgctgagcatgtgatggcgatggcacagatacgtggaggctttgtcccctcctcagtccaccttgacccaagcactggggggttcccagctggtctgtaagctgcgccccctgggctgtgccaggcccctccccaggggcagctccaccctctcctaactctccttgcccacgtctcccctgaacctgctggccccagccgtgattcagttgctcaaccgggtgcgtcaggagtttgagttcaacatgacagccacccaccacttctctgtggatctcaatgcctctcggagcctgtcccaggtagccatggacctccacgaggctgtcagcatgaagctgcaccgtgtccgagaggccctggctctgatgggcttcaccacgcctctgctgcttgtgcttctctacctccaagccctattttaccggtattgttacctgaactgggaccattatgacaatatctacatcactagccgattcctgcgcatggaggctgtgcgctccacggcagggctgcccacagtgctaccgctcagtgctcacgaggccaggcgctacatcccaccgggctccatcttcttgtcccaatgggagaagtttttttacattctggagaccttcaaccttatccgacacctcctcctcgtgctgttcctagtcttcctagactatgctgtcttctgggtgcttgacctggcccggcaccagctgcagggggagattgtggcccgcagtcctgtgttggtgtctctaaccgtggaaggtactggctacgctgggaatatttatcgtgacctggtgtcagcatttgatgtcctgcagcaaggcaacatcagtattttgtcccggcgttgtctccttcgtccctcggagcctgacagcactggctacatagtcattggcgtcatgtatggcctatgcttcttcatcaccctgtttggcagctatgtcagccggctgcggcgagtcatctgtgcctcctactacccatcccgggagcaggagaggatctcctacctgtacaatgtacttctgagccgccgaaccaatctgttggctgccctgcaccgatcagtgaggcggcgggcggctgaccagggccacagaagtgccttcctagtgctggccagtcggtgcccctgcctaggtccatttgtcagccacttttggctgcatcaggcctactgcctgggctgtgggcagccccaggatgagggagacatggagaacactgtgtcctgcagtacccccggctgccaaggtctctactgcctcacttgcttccgcctcctggacaatacctgctccgtgtgtgcatctcccctctcctaccagggggacctggacctggagctggactccagcgatgaggagggccctcagctatggctggctgcagctcaaaggaaggaccctgagcaggcatggttattgcagcaacagctccaagaagtgctcggcaggagcctctcaatggagtccacttccgagtccagtgacctggatgaggagaaggggcctcagcagaggaagcacgggcagcagcccttacctgaagcccatcagcctgtcagcattctcaccagccctgagccccacagaccacctgagacatcctccgccactaaaggagcccccactccagcttcagaaccctcagtccctctctcacctccctctcttcctgatccttcccacccaccccccaaataaaccaaaagtggac

SEQ ID NO: 2264 - DNA, 2765 bp, Homo sapiens
cagtgagccgagatctcgccactgcactccagcttggcagcagagcgagactccatcaaaaaaaaaaaagctagtgcaaacatggcagtctttcagcttagccccgcagaaaagaaagtgattttcccaggaactcttatcttatgtagtctgaactttaatgcagagctgtctgatagtgtcgtagccgtgacggagaaggccgtggggcctggaatctccttgctgtgctctgtggccccggccctctgtggacgcgtaatgtgagagtttttaaagagtaactttcttttgtccttctttaagatatagaccccagtccctcctttaaaatattggctcgtgctgtaatttccactttgccttttgccctttgaccatctgtgtgacaagaaagccattccgatggttcagtaagcacccgctgaggctggctccccacaggtccagctcgaggtgctggtggggacagcccaccctctgctgtgtgccgtgatcccagctggagctgctgcacacccagagggagccgcctcagtcacacgccagcagacaggtgcaaatggagtgatgcagacagaaagaaaggaaatcacacctcaagatttattttctttctagaaacacccgccgggcagcagaggtctggatggatgaatacaaaaatttctattatgcagcagtgccttctgctagaaacgttccttatggaaatattcagagcagattggagcttaggaagaaactcagctgcaagcctttcaaatggtaccttgaaaatgtctatccagagttaaggtaagtccccagggatctggggtttcactttgtaagggcttagaagccagtaaggccatagaagcagcagaggggaaatggaggtggggctgcaggcatgagattgggcacctgggccccagtgagagcctgtggtctcactccatggtgtggagctgagaatctgctcccaagttggcctgctgctgtctctgtcctgcagagctgccctcccatgcttcggagtcccagaggcagtcccccgggcctcaccttgtttttggcttgttctccattggcaaggtgatgggctgggtgacctgaaggactggtgtctgacaggctcttcgagtgaccaggagcagtccccagcctccgcaagcatgcagtgtctgcagccagccctcgatccccccgccaggcgcctttgcatgcctccgatctgctgcgctcacccttgctgctcctgtgggccagcagataacagcccccacgaggctccctcctcccagctaggttaatcacatgtgaaacggaagtaataatgctgctgccccacgtccctccggaggattcatggcagaaacacctttctgagcattatttccacacccagcctcttgttttaagcgaatacgagctccccatctggagggacctgctgataacctcgtgagaagacctatagatccgctggggtggaggagccatctgcacttcatcttcttaaagggactgtcaggcaggtcgtgccttaatgcggcacattccttattctaaatattcccagagcattttacagcggctcacatatctccagcacagtgcctgcgaacgcaagacttgccaccattatctttccgctaacagctccttcagagcccttgtcacggagatttgttggacagttaggtaatgcggcctctctctgttgctcctgttcgctcacttggctctttggaaccgtttcctctgcttttcaagtaacatgccaggcgccaggtggcccatgccccctaggaggagaacaggagagaacacagcgtccttctccctcggatccctgccgtgcaggacagcttttgctggggattgagagcaccagatggtcaccagcgatggtcacctgcagcggcaagggtgcactggtcacagttgctggttgcagggccctggtcttcttcctgccagctctgtcctctcggccatgtgcactcaacccaaaagaacccattctgcctctgtgtctggccccagaatatgatgtctacacctcctgcctggtgtccctatacaacagattcttgactgtgggcactaaggcggctgctcatcaactctccgtcagccaaagaggggcttcaattcagtggattttaacccaaccatgccactcactttgctttttcagtcacagttgactgccatttctcacagaggtcacccatggtttgtagtgacactgggccccgcacccactgaagaccacatctgaggcactgagcaccatcctggctggcaaatctgcttcccctgtctgtggggggtgagggagacatcagcctcgtgttttgtgtctgtaatatcaccgccgtttactgagtgcctcctacgagccaggcactgggccgtgtgctttacacgaaatgttctatgtaacacttgcagcagatctgggtagcccatagcctaccaaagggcaaatcgagcttcagagaaagtgagtcttgcctgaaagccagcacctggcagaggtgggctgaggtttggatctggttctgaagcacgttgttcttccccgtggctgtggctttgttcacattagaccacctgacaagtctgcccacctttcccgtctttactggataaaggtcagatcctaagtgtattggaaagttcaaggcaacaggatctgaccacattgattttctaaatgacttccaataagactaacattgaagagtatcaggagcttttccttcctttcc

SEQ ID NO: 2265 - DNA, 2308 bp, Homo sapiens
tccgccagcaggatggcctgctacggggtggctatgaggcacaggagccgctgtgcccagctgtgccccctaggaaggctgtccctgtcaccagcttcacctacatcaatgaggacttccggacagagtcaccccccagcccaagcagtgatgttgaggatgcccgagagcagcgggcacacaatgcccacctccgcggcccaccaccaaagctcatccctgtctctggaaagctggagaagaacatggagaagatcctgatccgcccaacagccttcaagccagtgctgcccaaacctcgaggggctccgtccctgcctagcttcatgggtcctcgggccaccgggctgtctgggagccagggcagcctgacgcagctgtttgggggccctgcctcctcctcctcctcttcctcctcctcttcagctgctgacaaacccctggcatttagtggctgggccagtggctgcccatcagggacgctatccgactctggccgaaactcactgtccagcctgcccacctacagcaccggaggtgccgagccaaccaccagctccccaggcgggcacctgccttcccatggctctgggcgaggggcactgcctgggccagcccgaggggtccctactgggccctcccactcagacagtggccggtcctcctccagcaagagcacaggctccctagggggccgtgtggctggggggcttttgggcagtggtactcgggcctcccctgacagcagctcctgtggggagcgctcaccaccacccccgcctccacctccttcggatgaggccctgctgcactgtgtcctggaaggaaagctccgagaccgggaggcagagcttcagcagctgcgggacagtctggacgagaatgaggctaccatgtgccaggtgtggtcagaggcaatgatggggaaggggcatggcaggacatcccaaggtgctgggattacaggcgtgagccactgcacccggccaagtgcttgctttttttattttttgagacaaggtctcattctgtcacccaggctagagagcagtggcgtgatttcagctccctgtagcctcaaccccctgggctcaagcagtcctctcaccccagcctcccaagtggctgagactacgggcgcatgccaccacaccaagctaatttttggtctttggagaggcagggttttgctgtgttgcctaggctggtctcgaactccggagcttaagtgatccacccacctcgcgtgagccaccgagcccggtctgcttgctcttgtgtttgtttctatgatcatcataaaagcagttagtattgttgttgcaattactattgttgtttaatggaatccacccttcctgagccctcggaagtgggctgccagagcagacactgagtggggagttgggaaagctgcccaggagccaggtctctcttctcgcctgcaggcatacgaggagcggcagcggcactggcagcgagagcgtgaggccctgcgagaggactgtgcggcccaggcacagcgggcacagcgggcccaacagctgctgcagctgcaggtgttccagctgcagcaggagaagcggcaattgcaggacgacttcgcacagctgctgcaggagcgcgaacagctggagcggcgctgcgccaccttggagcgggagcagcgggagctcgggccgaggcttgaggagaccaagtgggaggtgtgccagaaatcaggcgagatctccctgctgaagcagcagctgaaagagtctcaggcagagctggtgcagaagggcagcgagctggtggctctgcgggtggcgctgcgggaggcccgtgctacgctgcgggtcagtgagggccgtgcgcggggtctacaggaggctgcccgagctcgggagctggagctggaagcctgttcccagtgccactgccgaccctgttcacaggcgcttccagcccactccagccaggggagcagggaagaagaaggggctccctcctcttcacattccccccgaccccaaagccagagaaagccagatggcaccagctgctccggatgtgcctgcccacattgggggacagggccgggcctgggctcggttcccaggtttgagctctgcagcctctctcctggagtgagggggctgaagtcagaccaaaggaagaactcagaaatgtcttgtttatttgtgtttgtgaccaagcagcctctcccttcacccaggtttatggcctcgttttcacttgtatatttttcacactgtaaatttcttgtacaaacccaaagaaaaaattaaaaaaaatttttttgttt

SEQ ID NO: 2266 - DNA, 1853 bp, Homo sapiens
ggatacatccttatttaattttcaaccctataagatagttaatctaatggtccctattttatttattatttatttatttttgtgagacagagtctcactctgttgcccatgctggagtgcagtggcatgatctcggctcactgcagcctccaccgcccaggctcaagtgattttactccctcagcctctggagtatctgggattacagacgtgcgccatcacgcctggctaatttctgtatttttagtagagacggcgtttcaccgtgttggccaggctggtcttgaattcctgacctcaggtgatccacctgccttagcctcccagagtgctgggattacaggtgtgagccaccacgcccagccagccagtggtccctattttatagccttgtccatttgtcaggcaatgaaaccactgccttaaaatggagccaagcgctgaagcataactttgataatgagattgttgtcaattataggggtccctgaactgagtccaagtgagtgcattcagattttcacctgaagacaactggccatgcaaagtgcaattttcagaagatggtgtagacagtagagtgcccgataggtgggatgctggttgggaggtggagaacgtagagcacagggcacggttgggggccacctctgcagtacacagtacataaggaagtccccctgctggagcggaaccagcaggaagagaaaagatggggctgatgtgagatttcaaagccagaaaagtcaggacttagtgactgtgaagatgtgaaaggtgacggagaggaatgttataaagagggtttcaagcctgggacagaagttctccaaactgttgtttcctgcctctgtccttcctgcattcctaccctcctaactcaacaggtgagtaggtgagcgtctctgtccacgactcctttcagttgctactctcagccaagtctggcctgcagctcccctcaaacatcctcctgccctagaatgttctcagcgattccctcctgtttttactttctgttaagtgtgtatttccaatttagtattgtgatttcctcctttttccctttcccttttttcctttttcttccactcccaaccttcctctttttcattaatttttttttaatttaaaatgttttgaacatataaactcagtactacattgagctttttgggtgcagggaccgtgatttctgtagacttctatttctgtgatccagtactatgtctaacatgtattacatgctgaacatatgaatgaataaatgggaaatcctggggagtgtaccagaaataggtataaagacataaagttcatagcaatatagaagtagaaaccgactatcattgattttattgtcaagaggtgttcttcctttttctcttacgaaaatccatatggatttcagtatatttcatctctgactactccatagaataacagttaactccacaaataatatattttgagacaataataaccaagaagaacaaaatcaacagaacacgctataccataatatttttgatgggttcttcttacagctgattttaccccttctactccaaatttttgcttgataaaggtcctgctggataaagattctgataagctacaaaatgcccaaatgttggacagtagaagggagggaaagagggaaaacactttgcagaatggttcatttgcttcatggagttgaatatcatcgagtcctagggaaagcctgctgtttttggaaagtggacaaaaagagggattgcatagagcttggaatttaagagagaaactgtggaacaaagatgtaacgacattcattaatttagatctagattgagaatttttatattagg

SEQ ID NO: 2267 - DNA, 1914 bp, Homo sapiens
aaaattcactgggtgcgctggaacgcggcacacagtagtagtatgccctgcttaatacatacaggacatatttgaggccccttccaggggtggggtgggaggacagagggatggggggtgcaccagacgacacagccagactgagaaaggtggtcccagagcagagacagggacctcgacgcatcctccatacccgctgcggggaaatggaccccaccagccagcacgggggggaaactgaggcctggcgaaagaaagatgcggcctgaggtgggacgtgaacccgcggccctgcagcccagacagcggccccggagtgaccaccagcttcaccgaagcccctttactgtgcccccgaggacacctgcctgccgttccccagggccgtcaccgccgatagcggtagcgcttgaagtgaaaccacagctggaagatgccattggcaaactggcagcggaagccgtggcggtgcgagtattcccactcgcggttgacgatcttgaaagcgatgtcctcgtagggcggccccgcgtggaagcgcaggatggcgaaatccttgttgtcggcgcaggcctccaggaagtactcgggcgtggagcgcttgtcgatgaggtcggggtagaagatgttgaacttgtatccctgcacgatcttgggcggtgggttgtcaaagtcgtagtgcgtctggttgtacttgttccactcgaagcccgtgtgcacgcggttgaagaagcgcggcttgcgtggccggtacttgtcggcccacaggacggaggctgcccagggagtgctcggacagcggccggtaaaagcttccaccacctgtggccccaaggccagtgggccagcaagcccaggatgaatgaaggaacgccccagtgcgcgtgcaggtgacggaacgcacgctcagagacccgggggagaagcagcaagcagctccccactgacgccagcggcttcggccgggaaatgaggctggagaagccccgcccccagctcgccccactggccccaccccctggcctccagccccgcccttacccgtgacctggagctgctggcgcgagagctgcaggcgctgcaggtcctcatccggttccagcacgtgcgcgtccagtggcagctcgtgcgccgtgagcagccgcgggctgtacctgccggcgtcgtagtcgtccaggctctgctggatcaggtcctcctccatgagcaccgcctcgccctcgccctcgccctcaccgtccccgtcgccgtcgccctctgtcggggtcgcgccgtccacctcggcctccgcggggccgccctccgaggagggcccgggcggggtgggcgccacgtcctcaggctccaggctgggaggagagagcgttggaggcgcggaggctgccgacggcccctccatcctgctccacgtctgcatcggcgtccccggggtgccggccgggcctacctgcggctgggggactggggctcctgcttgaggatggggaacagcggctcgctctccacgccctgctcctgcttcagtttgtacagcttctgccgcagcacgtcctggtggcgctcacgcagcctgggacgcagggccggggtcacccgtatggaggcgaaggggctccgcgccccacccccaccgagattctcacgccccttattgctgcaaggaccctgagaaggtggcgagcagccacggctctggctgggacctttgcccaggcttggtcagttcagggtcaaggcttatgggagagaggacgagaggacgcaggtaccctggtgaaccatcccatggcagggagaggtgggtctctgtctcacgctgcagtctcagtgtcttgtggctggggctggccaggagaaggggcccagcaggacaccagccaacaagcatgataaatttagagacatttacaaatt

SEQ ID NO: 2268 - DNA, 1974 bp, Homo sapiens
atgtcctcttgccgaggatcctggggatgtccttggcccgcctctcccatccccttccctgacacatagcggccggtggacggctgaccccatgcccgcaggacctggccatgggctccgacgcagagggggagaagatcaaggactccatgaagctgatcgttccggtgctgctggacgcggcggtgcccgcctacgacaagatccgggtcctgctgctctacatcctccttcggagtggtgtgagtgaggagaacctggccaagctgatccagcatgccaatgtacaggcgcacagcagcctcatccgtaacctggagcagctgggaggcactgtcaccaaccccgggggctcggggacctccagccggctggagccgagagaacgcatggagcccacctatcagctgtcccgctggaccccggtcatcaaggatgtaatggaggtactgggtggcaggtcagggtgggggccagccctccgcatcggctggcggctcagcctccctcctgctgaggtgctaagcctcagggcttaggggaaaatgctcattgctggcattcccttggcaccgatctgctctgctgaggggggcacgccaagcccgcagctgaggaattggggtgacagcggggcctgtgctggggagcctcacttcctccccacctgccggctgcctccgctatatctctctagtctgttcccctgtcccgcaggagtgcccctgagccccagccctggccttcccaggatcccagggcagcaccatccaatggcaatgggcctggggcggcttcctggcttcctccttgtccctctaagagccccggcccctctttctgcgtgggggccagagacctgggcctcctcatccccatggaccttgaatacctggacttctggggctctgaggggctgagagcccagacactgggttccccaaagggctgggggtattgactgatggtccccaagggcctggaggcccagactactgggttgccgaggaactgtgggtttagacttctgggtacccaaggagttatggaattagattcgtgggtccccagtgagttatggatctagatttctaggtccccaatggactagaggcctagactcctgggtcccccagaggcaggaggtggagatgctggttcctgtctgccaggatcttggcccctgaataccccgtggggggcactcctgaccccggaccccatgcctggggttcctcccctaacctgcctctcggccgccaggacgccgtggaggaccggctggacaggaacctgtggcccttcgtatccgaccccgcccccacggccagctcccaggccgctgtcaggtgaggccccggggccgcccccgcccacgcctgggtctgtgttaggtgggcggcctggcggcggtgagggcctcctgcctggactttctgcccctgccctgcacagtgcccgcttcggtcactggcacaagaacaaggctggcatagaagcccgggcgggcccccggctcatcgtgtatgtcatgggcggtgtggccatgtcagagatgagggccgcctacgaggtgaccagggccaccgagggcaagtgggaggtgctcattggtaagtcaccaggactgggaccctggggtctggggcttgggttcccggggcctgggcttgtaccttctaggtgtctggactccagagtccttggagtcagggacctggtttgctgagggacggggacagccccacaccagccgggaccgggagcctgtcaaagacgaaggcagcgccccccaacatcttccccaaacctctgcccctgcacaggctcctcacacatcctcaccccgacccgcttcctggatgacctgaaggcactggacaagaagctggaggacattgccctgccctgacccctggccccgccccctacccctccctttccagagaaataaactcttcccgtcgctctgcc

SEQ ID NO: 2269 - DNA, 1902 bp, Homo sapiens
tgtctccagtgtgagtcatgctcccccaggagttccaggagaactcagcctgcaggtgacaaggacaatgtattcccctcccttgggaaaccttccagccctccttgggtgcaggtcatggtagatgggcctcattcctcaaggcatgtgctgagggagactgggggcaggtaccaggtgtccttactgcagagaaagggaggctgctcatctccccaactctgctgtaatgggaacagtgtgactgtgagtcactggggactagtccttagggaagccatgagaaggacagcttgcccctctggcctttctccctgcttctttatcagcagcttcagcacctgccacctgagaagatggaaaggaaggagctgcccccagagcatcagtccttgaagagcagctttgaggcgcttctccaacgctgctccctgtctgcaactgacttaaagacaaaaaggaagctggaagaggcagcccagcgtctggagtatctatatgagaagctctgtgaggggacagtaagtacagctagctgtgctcccactgcctcctacacttccaccatcaccatggccaaaggaagcccagtgtcttttcttcccataggtgtcactgacctgggttccccacaaaatacgtgcatcttgcctggactgggccccagaacttaagtcttcccttatcccttccatgctgccagggtaggagctgggttgggctcactaacctaagggtcattccctccacagctctcacctcatgtcgtggctgggctccatgaggttgcccgatgtgtggatgcaggaagctttgagcagggccttgcagtgcatgcccaggtggcgggctgtagcagcttcagcgaggtgtccagcttcatgcctatcctgaaggctgtcctcatcatcgctcataagctgctggtctaaaccaggcagcctctcttgctaggaggccacttctgctgttacataactcctccctgcagaagaggggacttctgcaacagattctgtttctttttcccgactcttttccttgctgccaggtatgtgatgctgtaggcttggctccaaaccagctgagtgcctgctttttactcctttatgtctggccttctaggatctgtccaagacactctcaggcctggaggcagggcatagaatcagttcttcactctccctaatactacactctgtaaggacctggggcaggatatcttctcccccagggatcttctatttaagtggcttctgagagggtgaacaggattgttacttttaagcctacctctgctgtgacccatcatgtgggtcttttgtttctcccttctgtggtttatgagcctgcccttaccttttccctgcctctgacttggtatttccaggtccgtatttctctgtagcccagggtctggggtagagctgactgctgttcaccctttgaacaactcatggacgtgagggatgggtgctgagcagaaccaagagaggaaactttggcgctgttaaaatggaatttctcatctgccggcattattaagggtgggctaggttggatggaaggtgaaagggatgaactgccttttgctggaagctgtcttaggctgtgagacaggagcaggggaaccacagcctatggggaactgcccttgactctacctatgttggagccttagcccaaggccattccttctgtgatgataaagcccagttctggaattggagccatattaaggaatgattctcttccagcgctgctcctcaagggttgggggtccttccccctcgcagccaccacatgtctcagggctaccttctccgattggatttgcatttgtggcactgtctttgatgcagtgatgtacttaatggtgcaataaagctgcttcgatttggt

SEQ ID NO: 2270 - DNA, 2065 bp, Homo sapiens
tcagggtcacttgggcccacaggggcctccgggtactcaaggtatgcagggaccacctggtcccagaggaatgcaagggcctcctcatcctcatgggatccaaggcggaccagggtctcaagggatccaaggtcctgtgtctcagggacctctgatgggattgaatccaagaggaatgcaggggcctccaggcccccgggagaaccagggtcctgctccccaagggatgattatgggccacccgcctcaagagatgagaggacctcaccctccaggtggactactgggacacggccctcaggaaatgagaggtcctcaggagatccgaggcatgcaggggcctccaccccaaggatcaatgctgggacctccccaggaattgcgagggcctccaggctcacaaagtcagcaggggccgccccagggctctttaggacctccaccccagggtggcatgcaaggaccccccggacctcagggacagcagaacccagcaagagggccacatccatctcaagggccaataccattccagcaacagagaacgcctctgctaggtgatgggccccgggcccccttcaaccaggaaggacagagcacaggccccccacccctgataccaggcctagggcagcagggagcacaaggtcgcattccccctgataggcgtggccctcacccagacttccccgatgacttcagcagaccagatgacttccaccctgacaagcgctttggccaccggttacgtgaatttgaggggcgaggaggacctttaccgcaagaagagaagtggaggcgagggggccctgggcctccgtttccccctgatcacagggaattcagcgagggggatggccggggtgcagcccgaggccctccgggggcatgggaaggccgcaggcccggagatgaacgtttcccccgggatcccgaggacccacgttttcgagggcgcagagaagaaagtttcagaagaggagccccgccgaggcatgagggccgtgctccccccagaggaagggatggttttcctggtcctgaagactttggtccagaggagaattttgatgcttctgaggaagcggcccgaggacgagatctcagaggtcgaggtcggggtaccccacgaggaggaaggaagggtttacttcccactcctgacgagttccctcgctttgaaggagggcggaagccagattcctgggatggaaacaaagagcctgggccaggtcatgaacattttcgtgatactccccgccctgatcatccccctcacgacggtcattccccagccagcagagaacgctcctcttctctccaaggcatggacatggcatccctacctccccgaaagcgcccctggcatgatggcccaggcacttctgagcacagagagatggaggccccaggaggcccttctgaagaccgaggaggcaaaggccgagggggtccaggacctgctcagagagtgcccaaatctgggcgttccagctccttagacggagagcaccacgatggataccacagagatgaaccttttgggggccctccaggcagtggcaccccttctcgagggggccggagtggcagtaactggggtagagggagtaacatgaactctggcccgccgaggcgaggagcttcacggggtggtggaaggggtcggtagaagctggaactgagtaccctgaggcctctctggacagtatgtaagaacttcttgtggactcaccaagagaaacaaaaggaagcctgcaccattgtagccctgaactcttttctgggcacctgaatcccaggaaccctcaatgaggtcttcaagatgaagagactgctgccagctaccagcctggctggccctgtcctgtccaccctcattgccccaactcccatgttgttttgtgaagataaaagctgggatctttttcttttttttaagtctcacaagacatggggcatctccacaaatttaagttcctgtccatttggaaatttgtttctatgtgtacagtttgtcagagaaaaacaaagtttttgtatgaatacagaatgtgatttacgc

SEQ ID NO: 2271 - DNA, 1881 bp, Homo sapiens
ttttcagtacaatgctgaaccatacatagatgttcatgtctctgtgcacgttgggctgactgtgcttgcagaatgtgaagtggaaaatatctgaacgaacattttgtatttatagaaaatgatgaagatgaggatgaagatgttcaagttgaggaggatgagaaagtgctggaatcatcttcccccaggtgacactgaatactcaggagcaagtaatgggtgttaacatatgaaaatgtctaggaggcatgccctctctggcatctatgatgggccaaaagcccgcattcccttggccacagtatgtgaaattcaacccagcttagacacagggtgtggcagctgtcgtgtttctgtatgtgtgccaagtgtcatgtctgtaccatacagggatagctgagtcttcatcctcctcagctcctatttgtccagtgcactgaacaccagctgctctcttcctctctggctcccatggcagccatgctctgttgcagagagaagaggattgcctgttccctcttaaagggaacctccattttgctttctgggaccactctcttaatgccgcttgtcaaaaccagctaggactccttggggtccaatccctctgtgtttaatcttctgtcatctctgtcccacctggctcatcagggagatgcagaaggctgaagaaagcaaagtccctgaggactcactggaggaatgtgccatcacttgttcaaatagccacggcccttgtgactccaaccagcctcacaagaacatcaaaatcacatttgaggaagacaaagtcaactcatctctggttgtagacagagaatcctctcatgatgaatgtcaggatgctctaaacattctcccaggtagcctctattttccttgtgtctcatacctctgtctaggctatggaagatcaattctgaggacaggctgtatatacacatattgttattgttttagtcagaaactaggatggaactaggtgctgtgactcacacatataatcacagcactttggaaggcccaagtgggaggatgacttgagttcaggagttgaagaccagcctggagtatatggtgaaacccatctttacgaagaatacaaaaaattaggcagtcatggtgctgcgtgcctatagtcccaactgctcaggagacttaggtgggaggatcggctaacacgatcctcccactctcgttcactcctctcaggctagactctctctccttttcattggcttgtcttagctattaataagaagtcttggccaggcgcggtggctcacacatgtaatcccagcactttgggaggccgaggcgggtggatcacgaggtcaggagattgagaccatcctggctaacacggtgaaaccccatctttactaaaaatacaaaaaaaaaaaaaaattagctgggcgcggtgttgggtgcctgtattctcagctacttgggaggctgaggcaggagaatggcatgaacccaggaaccggatcttgcagtgagccgagattgtgccactgcactccagcctgggagacagagcgagactccatctaaaaaaaaaaaaaaaaagtaagtctctgaccaggggcgctggctcacatcttaatcccagcactttgggaggcggaggtaggtggaacacctgaggtcaggagttcgaaaccagcctgtccaagttggcgaaaccccatctctactaaaaatacaaaaattagctgtcatgttacttggcgcttgtaatcccagatgcttggcaggctgagtgatgagaatcgcttgaacccgggaggcagaggtggcagtgagctgagattgtgcctctgcactgcagcctgcgtgacagagtgagacgccgtctcaaacagaaaacaaaaaacc

SEQ ID NO: 2272 - DNA, 2471 bp, Homo sapiens
gaagaagtgagcttggccagaggcacgctgtttaatttcaaagtgctgctgactcaaactcatgagtcctggaggcaggtagaggcacttgtaggctgaggacccgtagagcccggtgtgccctgcccaagccccacctgggaatggagttatctctgtaaagatcttgctgcctttgagcaagcactgcaaacggggtaactggaacagccttgtcgcgtgtttccacccttcgtatgaggcaggtaccatgggtcttcaccaacagcacggcctgttgtctccaggaaatggtagcccctcacagtgctttctgtctgcttgtttagctttggcatttgaatgtgcagaatggtggactttgaaattaatgtccttctgttgactgcagagtttctgctggaaatgcagggaggctgcttgtggggttcgcgtgctgtgggaagtagggaaaatgagctggtttactttgtgtctttttgtgcatgcagactgtttggattttgccaacagtttctgggtgctgcctgctttttaaacttttaaaaaattgtaaacagcttcagtggctttgcagaaggaagctgtggtttctggtcttcctgttcagtcatgtttttttcagagggagggctaacatctggccatatttttcaacaaattcagaagtgagtagagaatgcatagtagctgtcggcagaggaggaaccagaatctctccaaagaaattcctcaaacagaatttcacacagggtattccatggagaatgagcctggaattgtctcgccatttaaacgagtattcctaaaaggtgaaaagagtagagataagaaagcccatgagaaggtgacagagaggcgccctctgcacactgtggtgttgtcattgcctgagcgcgtcgagccagacagactgctgagcgactatattgagaaggaggtaaagtatttaggtcagttaacgtccataccaggatacctgaatccctccagtaggactgaaatcctgcatttcatagacaatgcaaagagagcccaccagcttccgggacacttgactcaggagcacgatgctgtgctcagcctgtctgcgtacaacgtcaagctggcctggagggacggggaggatatcatcctcagggtgcccatccatgacatcgccgccgtctcctatgttcgggatgacgctgcacacctggtggtcctgaagacagcccaggacccagggatctcccccagccagagtctgtgtgcggaaagttccagaggcctcagtgcaggctccctgtcggagagtgcagttgggcccgtggaggcatgctgcctggtcatcctggctgcagagagcaaggtcgctgcggaggagctttgctgtctgctaggccaggtcttccaggttgtttacacggagtccaccatcgactttctggacagagcgatatttgatggggcctctaccccgacccaccacctgtccctgcacagcgatgactcttctacaaaagtggacattaaggagacctacgaggtggaagccagcacttgctgcttccctgaatctgtggatgtgggtggtgcatcaccccacagcaagaccatcagtgagagcgagctgagcgccagcgccactgagctgctgcaggactacatgctgacgctgcgcaccaagctgtcatcacaggagatccagcagtttgcagcactgctgcacgagtaccgcaatggggcctctatccacgagttctgcatcaacctgcggcagctctacggggacagccgcaagttcctgctgcttggtctgaggcccttcatccctgagaaggacagccagcacttcgagaacttcctggagaccattggcgtgaaggatggccgcggcatcatcactgacagctttggcaggcaccggcgggccctgagcaccacatccagttccaccaccaatgggaacagggccacgggcagctctgatgaccggtcggcaccctcagagggggatgagtgggaccgcatgatctcggacatcagcagcgacattgaggcgctgggctgcagcatggaccaggactcagcatgatggacagtggatgggggggcacccacaccttccgcgcagtcgtcataggccttcccagaaggagctgcccagacctgcgtgtcagcccttggtggtggccagggagaggcgcccggtgcagatggccccgggcggcccaggtcctctactgtgaaggagcagggagctgccgagggacacgagcctcagtgcggggtggaaggctctttgccttgtccaccagggctcagccaagccctgcagtgtgtccccgctcggggagggcccggccgagcgggcagggagagccagtcctgtcggctgggcccttggacggctgtcagttttgcacatgatgttcctattgtaactctcagagaccttaaaaagaagtttactgcaatgtgaataattt

SEQ ID NO: 2273 - DNA, 2642 bp, Homo sapiens
catttcaggaggacagtcagtccttgaacccataaaatccgtcaaccaatccattaaccaaacagttagccagacaatgagtcaatctctgattcctccatctatgaaccagcaacctttttcgtcggaattaatttcatctgtaagccagcaagagcggatcccacatgaacctgtgattaattcatctaacgtacatgttggatcaagaggaagtaaaaagaattaccagtcacaggctgacattcccattcggtctccctttggtattgtgaaagcatcctggctaccaaagttttcacatgctgatgcccagaagatgaagagacttccaactccttctatgatgaatgattattatgcagcatctccaagaatatttccacatttgtgttctctgtgtaacgtagaatgtagtcatttgaaggtgagtgtttttaaaaaaagatcactgtataatgatgctcagcgccagttttctctaaattctgatatgtatgctgcttgttaactaggcgttaaggaaatggcagaaggtaattttaattgcaacctcaatacatagttgtaatcttaagtagccctggccttagtactgaattgaattttaggcttactgtattcctatgaccgggcacaccatattttagtagtgtgtccatttattttgaacttttagttatcccacttacgcaacataaaatttatgtaacataagctgcgtacttacaagacaatgtcacatggaatcacctttctctaaaaggatctgttagtataaaaatacaaagagatggtataacccatttgtaatgcacacatttaagagacagtatattatagccttgcacatatacacctgtcttgggataaagacaattaatgttgatttaaatatttcctgactttatgtagactagtgatttttagtattttttgagaagaagctttctaaaataacttcatagcaaaaataagtcaaggtgcagtaattattctgggaccagctgtggactcagaaaatagtgtaaaatgatagaaatttgtagagaaaaatctttaaaaaataaagatgatttaggtagtttgatagtatagttagaaggaagtattttgcagaggcagtgaagtgtactataatgtagaacatactgttcagtcgtaatcattggtagatttgagcaggaatttccaagtaaattttatttacttacgtatggttggcaatcactgtttcttctatttactaatgtgatttatagatttagattgtaaagggtcagaagagaatatactaacatgggaaaaagctttgattcaaggccatggcctggaattggttgtatacttaggcttaaaaatctgtgtgttaacgctcttgttcttttcttccagtgctgcctttcgattttcttttcattatttactcactaggttttcgtcaacatgaatctgataattagatctgttggtattttcttaaggttaactccagcaaaagaaagcagcattctaccccattttagccagatgtgccaaattctattaaaataatagttgccttattccatcagaagggatagcaaagtccttacaagggaaagtcttagaataattcatatcacctaattgtaatctgtaagtagccctggcctaagtagtgaattgagtgtttgtctgtattcttgtgactgggcataccacataattttttttaattgattttgaacttttaattaatcataatgaatccaagaaaatacatctttaaataaagaacttgaagttttgtattctgtagagtagaaaaggtgtacatttaatttagtatgtacttatggatatcagttttgtacttgactccaattaggtactggggcagaaatgaggaactgtgtaaaattttagatgttattaagcagtttattcagtcttattggggagaaaaattatgctcccaagacatttaaaacaattagaagacaacaagtggttttgtgattgatttaacttgtttggatatgctgtaggggacagagatttctgtcttgatttcaggcatgtatcactcaggccagcatcatcaatttaccaatttaatcattaccaatttgccaatttaattattttaactatcgtatttgtaacagtatgtgtttaaaaataagtataaatatgcatcctgacatcaaaagacttttatagcctagttagactaatggaatgtcagttactaaatgcactaagtctgtcttgactagaatgatgtgggagagaagacttcatggagtaggttgaagatgggtcttgaattgaggctttagatatgcctgtataaagaggaggagggggccgggcacagtggctcactgcctgtaatcccagcactttgggaggccgagacaggtggatcacctgaggtcaggagttcaagaccacccttactgacatggtgaaatcctgtctctactaaaaatacaagaattagccgggtgtggtcatgcgcacctgtaattccagctactcaggaggctgaggcagagaatcgcttgagcccaggaggcagaaggttgcagtgagccgagatcgcgccgctgcactccagcctgggtgacagagcgagactccatctcaaaaaaaat

SEQ ID NO: 2274 - DNA, 2026 bp, Homo sapiens
attaggtttgagctgtgttgactaccactgctttttccttggtctcacttacgtcttggaagatggctctgcagatccctggaggcttttgggcagcagctgtgaccgtgatgctggtgatgctgagcaccccagtggctgaggccagagactttcccaaggatttcttggtccagtttaagggcatgtgctacttcaccaacgggacagagcgcgtgcgcggtgtggccagatacatctataaccgcgaggagtacgggcgcttcgacagcgacgttggggagttccaggcggtgaccgagctggggcggagcatcgaggactggaacaactataaggacttcttggagcaggagcgggccgcggtggacaaggtgtgcagacacaactacgaggcggagctgcgcacgaccttgcagcggcaagtggagcccacagtgaccatctccccatccaggacagaggccctcaaccaccacaacctgctggtctgctcagtgacagatttctatccagcccagatcaaagtccggtggtttcggaatgaccaggaggagacagccggtgttgtgtccacctccctcattaggaatggtgactggaccttccagattctggtgatgctggaaataactccccagcgtggagacatctacacctgccaagtggagcaccccagcctccagagccccatcaccgtggagtggcgggctcagtctgaatctgcccagagcaagatgctgagtggcattggaggcttcgtgctggggctgatcttcctcgggctgggccttatcatccgtcacaggggtcagaaaggacctcgagggcctccaccagcaggtaatatttcagccatgatccagtcaggggagagggcacaggcataagagggaagagccatggtgaaaccgcatctctactaaaaatacaaaaattagctggacgtggtggtgtgcatctgtaatcccggctacttgggaggttgaggcaagagaatcacttgaacccaggaggcagaggttgcagtgagccaagatggcgccactgcactccagtctgggcgatagagctagagtctgtctcaaaaaaaaaaaaagaagagcatgagcggagtgttccagggcacagtggtctctgttcatggcctgtttgctgctatgagggttaagacttaggggaaaagtttgccagtttctacgaatctccagagattgtttcctagaaccaggccttaactttggtggcatctttttgtgaaatgtggggacagagccacatcttgaatgtgagatagtagggtgatgcccactttgtgccacattttgttagctactgcctgtaggcattttcagtgactaaaagaggctgctagtggtggagatgaagtgtcacccaatttactaaaaaaatcaaactcttcatattacccagaagggtaactgctgttcccccacctccacatatctgcatcaagctgaagttctgtgtcctcatgagctgattttacctttacacagatattggggaacgtgatgatgatatgccctggacctcagcatcctctgtttgatgctacagagggaactgaggactaggggagagggtgtgtccctcagggtaccctgtgctgatcatgcctcgtctctcttctccaggactcccgcactgactcctgaggacttttgtctgggattggtcatcactcttctgtaatgcccacctgcccctgcccagaattcctagctgcctgtgtcaccctgtcccactgaggtcagagtcctacagtggctcatgcagccacaggtcaccttctgtgatccccatcccaaggcactggtggtgactctgcttcctgcactgacccagagcctctgcctgtgcactgcaagctgtgtctactcaggccccaaggggcatctctgtttccattctccccccacagacctgtcaagagaagcatgacaaacaaaatcatttacctgactttagtgctttttcccataattaaacctgattctgagtt

SEQ ID NO: 2275 - DNA, 2541 bp, Homo sapiens
aaagaaaaaaaacagccaggcattgtggtacatacctgtagtcccagctactcaggaagctgaggcaggaggatcacttgagcccaggagttggaggctgctgtgagctatgatcgcactactatactccagcctgggtgagagagcaagaccctgtctcaataataagagagagagagagaaaggaaagaaacagaaacgaaagaaagagaaagaaagaaaggaaagaaaagaaaaagaaaagaaagaaagaaggaaggaaggaaagaaagagagagaaagaaagaaaagaaagaaagaaagaaaaagagaaagatggaaggagggaagaaagaaaaagaaagaaagaaagaaagaaagaaagaaagaaagaaagaaagaaagaaagaaagatggaaggagggaaggagaatgaaatgagcatcatttccaaattcagtcttggtgcagtcgctcacgcctgtaatcccagcactttgggaagctgaggtggacggatcacctgaggtcaggagttcgggagcagcctggccaacatggcgaaatcccatctctactaaaaatacaaaaattagccgggcgtgttggtggatacctgtagtcccagctactcaggaggctgaggcaggagaatcacttgaacccggtagggcggaggttgcagtcagccgagatcgcaccactgcactccagcctgggcaataaagcaagactctgtctcaaaaaaaaaaaaaaaaaaaaaaaaaaaaaaccaattcatttgtttattcatcacatatgtattgagtatatgtactgagtgccaatcacatgcccgtcacatgtcaggcaccatcccaggagctggagttagcagtaatcctgtcactgtgttcagaatctcgggcaacccgaagcccacggctggctctcgatggggagggaatgagtgaatgaatgagatgccacagcagggcctgacaatgcctctgcctctcccagccttccacacgccaagccagaaggcctgaggcagcacatctgagctgactgagaccccattagcactccgggccgggggtggccagggcacctgcctggcagcctcaccctcttctgaaacctgctctgtgtcatgtacccagctctgctcagcttcacactccccgcacatcacttggtcccctctgccgctcttggctcctgtcctgtcttctgccatgagccatattacacggccgccctgggaggagagcttgtctataccagcagctgcctgattcaagcccaggggagccgctgtgtcttgtcgtcccggccgcgggagatgagcatcggtccgtgtgcgttccgggctgaacctggtggccgtatgacgagggacacgatggctggcctctctctatttttttctaagccccagtgacatgtgtctaggtccctgtttgatttgtgtcttgtgtcttgtttcttcccctcccctcccttttagctgcagagagccaaatcccccatcagcctgaagcgaacatcagattttcaaggttagtgagacgcccaaatctctcttgcctgtctcatctgtcactctgtctctctcggtccatctgtttctcccactgtaacgaacaatcctgcgtggtaaacgtggcgggttctcgggggtctcggagtggtgggggtccatccaaatagcaattaatgttcatcgtcattcaaagcaggcaggagccccaactgctgaaaggtcccctctgtggttccctccacgcttccccgcctctcccggtgggtctgtccggaatccctggtgcgttagctgaactgtgcgttttgcccgtggcttctcagcgaaaggactctttgaccctcttccaagacttttggccgggtgttcccccacaggacttcacaggaggctggttcattcgtcagtccctggttctccgagacacactgccttcagaatcttctcttttgtcctcaccatgtctctgggagtgacagatcggctagaagggtttgcctaagcaaatcaagcacctactatgtgccaggtgctggaaggcccaagtagatgtccatagaccccacacactcaggcagggccacagccaggaggtggaaagtgcatgggtcctgagagtggctggacaaaggtcagagaaggatccatcaagaagggcacacttggccgggtggggtggctcacacctataatcccagcactctgggaggccaaggcgggcagatcacctgaggtcaggagtttgagaccagcctggtcaacatgatgaaaccctgtctctactaaaaatacaaaaattagccgggcgtggtggcagatgcctgtaatcccagctacttgggaggctgaggcaggagaatcacttgagcccgggaggctgaggcaggagaatcacttgagcccaggaggcagaggttgcagtgagccaagatggcaccactgcactccagcctgggtgacacagtgagacgctgtctcaaaaaaaagaaaggaaagaaacagaaacgaaagaaagagaaagaaagaaaggaaag

SEQ ID NO: 2276 - DNA, 2120 bp, Homo sapiens
gaaatggagttaggctcgcgccggcgcagtgtcggctgccggtgccgcggcctttgtctcgcagtcaggagggagcaagtgacgtttgaggacgtggtagtggacttcagccaggaggagtgggggcagctgaagcctgcccagaggaccctgtaccgtgatgtaatgctggacaccttcaggcttctggtctctgtgggacattggttaccgaagccgaatgtcatctccctgctggagcaagaggcagagctgtgggcggtggagtctagacttccccaaggcgtgtacccagacttggaaactagacccaaagtcaaactgtcagttctaaagcaaggcatctctgaagaaatatccaacagtgtcatcttggtagaaagattcctgtgggatggtctgtggtactgcaggggtgaggacactgagggccactgggaatggagttgtgagagtctagagagcctggcagtgccggtggccttcacgcctgtgaagacgcctgttctggagcagtggcagaggaatgggtttggggaaaacataagtctgaaccctgatctcccacatcaaccaatgactcctgaaagacaaagcccccacacatggggaacacgtggaaaaagggagaagccagacctaaatgttttacagaaaacctgtgtaaaagagaaaccctacaaatgtcaggaatgcggaaaggcctttagtcacagctcagcacttatcgaacaccaccggacgcacacaggagagagaccttatgaatgtcacgaatgcttaaaaggcttccggaacagctcggcacttaccaaacaccagagaatccatactggggagaaaccctataaatgcactcagtgtgggaggaccttcaaccaaattgccccactgatccagcaccagagaactcacacaggtgagaagccctatgaatgcagcgaatgtgggaaatccttcagttttaggtcctccttcagccagcacgagcgaactcacacaggcgagaagccctacgagtgcagtgagtgtgggaaagccttccggcaaagcatccacctcacccagcatctgcgaatccacactggggagaaaccctatcagtgtggtgagtgtggcaaggcctttacccacagctcctcccttaccaagcaccagagaactcacactggataaacccactccacatgtgctggggacataggaagaccttaagccatagctcatccctttctagatttgacccaatcatacacatgagaaacgtacgttcatacacaagccttttcacacagcactcccctcagacaccctcagagagttcacactgatgggaaatgaccatgggaccaccaagctctaggtcatccatctctgcatccaaatagtagggaaacgtggagataatcaacactcaggaccttcagccttgaacgcccattagtgctatgttatagaacctacaaaaaagaaatggaacaaatgtagtggatccagggaacgcttttgtccaaggattcaccgtattccaaaccagagatgttcaaattggtgagaaacccaacaaatgcctttcatatatacgagaaccaaatgaagtcagaatttgccattattgcacattacatttttgggggggaaagtgcttatgaatggtgcaggttgactctgatattcattcccaaatgacagtatggcagagtgttccagaaatgagagtggcatctttatggaatcactatggatactgactgtctcagtaaacagctgtcttgtctgtgtgtatattgtttgatcagggtacatggcagccagtcacagattggaattacatatgacaaagtatcagtgtactataaacaggtttttagttatccctgcattatttttgcaattaatctttatatgcaatgagattgaaaagctttgtatgggaagactcaaaatgtaaagctgcttccgtagagtctcactgattctgagatggcttttgctgctctgttctccctctacatttctctgcagaactcgcgttagaaacacagatatttgttttacaaaaagggagatttttcctttgttaaaccatcgtcttataagcaatagcaaattcatgttag

SEQ ID NO: 2277 - DNA, 2052 bp, Homo sapiens
attccaggaagcgtttgcacatcctggccccagaagattttgcgtagcctcaccaagagaagaagttggaaagaaaaaaaaagaagttggcaaggcatccagaggagacccccccagcacctgggttctctgccaggggagagagttatgaagaagacttgagcaggcagtccagagctgatacagctgctccaatcaccagagatgcaatctcctgctagatgtcttcacatctacctttctatgtcacatgtgcaagatggttgctctgccttcagacatcacatttacattccaggcagaaaggagaaggaaagagcaaaagatgtgttccgaacaaatccatcttaaaaacaaacaaggggaggggtagcaggagaaaatttaaaaagaagaagaagaaaaacaaaaacaggaaagccgttgtttccctaaaagccccatcaagccgacttctaccggtgactcattacccagtcatgtggccacgcctggattcaaggcagtctgaggaggtgagtgtttcaaagaggcacatggatgccacagacaaaatcaagtttccatggttgaaggagaagaggacgatagagtttggggaggcagcaggctacgtctgccacagaagatataaagatatggagccacacgagaagatgggggaggctgccaaaaaagtccactgggtacagatgaggagcaggtgacattggagttgctccatctgaggagcccgcacctgcaatggcttgtgctcctgctcctgtgggtataggcacaaggctgatgccgagagagtgagttgtttctgttggggttcagaacacaataccccaaagtatggcgatgagtacttaactaaaggacattggaaggcctcagaagcagcctcagatccaaggtccctctgacctgctcctgccctcctgtctctctcgtccctcgttctcccctgaagtgagtcatagaaaccagaatcctcttccccacggtaggtcctagaaactagaaccctttttccccgaagcaaaagccataaaaactggaattattactctaaactctccttgactttttgtccagaagatggccataaagaaattctcagctgggtgtggtggctcgtatctgtaatcccagcactttgagaggccaaggtgggaggatcacttgaggccaggagtttgagatcggcctgggcaacatagtgagacccccatctctacaaaacttttttttttaaacttacctaagcgtggtggtacacctgtagtctcagctacttaggaggctgaggtgggagggaccctgctctggctgtgactgctttatcacagggagtgcctatctgtgggctgctttctacacattaaagcattttcagaaagggccagcatcagccttggaaaaaaggaggaagagccacggagagtctccctttatcttccccttatgtgatgtgagagtgcacatgactgtgtgcacatacacacacacacacacaccacacacacacaccccacaggcacacagggtcaagaacatgctgggcagagcttaagccactgaatgtttcagtaggaatcatgatatctaaaaataggacagctgataagggggttcttactactcacagttcctggaattatatgcaattgcatcttggaaactcaacaaataaacagttagtatggaattaaggaattaagtttggtgaagttcaaagaagctgatgttactcacaagagtaaatagagaggaaaccgggcgtggtggcttcgcgcctgtaattctagcactttggggggccaagacgagcagatcgcttgaggtagagagtttgagaccagcctggccaacatgatgaaaccctgttctctactaaaaatacaaaaattagctgggtgtggtggcgggcacctgcggtcccagctacatgggaggctgaggcaggagaatcgcttggacccaggagacaggggttgcagtgagccaagatcacaccactgcactccagcctgggcgacagagcgagactccctctcaggaaag

SEQ ID NO: 2278 - DNA, 1988 bp, Homo sapiens
aatttttgagggatcttttccctcttgtttatgagggattttccccttcctgtgtatggggactttcaccctcctgttaaagaaagttttgtcttttttttttttctagtgagtactttactctttttgcacttggtttttatttcgacttttgtgtgtttgatgttaaaccaagtcacctagatttatttacaaaatgggctttcagggttcaaaggcatgcgaaagtaactcccccattgaggactccagctggttatatgcttaaacattacggtctgtctctctctttttttttttttctgagacagagtctcactctgttgcccaggctggagtgcagtggtgcagtctcggcgcactgcaacctccacctcccagtttcaggtgattcttctgcctcaacctcctgagtagctgggactacaggcatgcaccaccacacatagctgattatttttgtatttttagtagagggtttcactatgttggccaggctgaaacattatggtgtgctatcacatatcttcttatcttgataaactgattatactaaagataatttgagattacagtggccttcattgggttcttttgaccttcctaaatttgttttcctcagagataaattagaaggccaaggccaaaaaacagtctaaattggacatataccttagttggtatcttcaggcatccaaatgcatttaagagtcggaatttgccttgctccaaaatacttctctgagtgatctcagacaaacagagaaaaaggacttagaaattcaaactttttctatttctcaggtgccaccttttcaagcttctgttctattgtgatatttcctcacttttcaaaacttttcttcttccatgatatttcttaccctactattcttcctccccctgcttcccagcctctacttacaaaaacttttccctttattattaggccgtttaacaattgtgaggttccccagatttcctgtgtcccttgagctaaagctgaactctgtgctcaaaccaaggaatttcgtaggttattgaggtcccttgtcattttgctgactaatttaacattacatttcaagtttaccagactgtcttctccaatgttttttttttttttaaagagatgggagcatctcactctgcagcctaggcagtggcatgatcatagctcactatagccccaacctcctgggctgaactgaacctcccacctcagcttcctgagtagctggaaccacagagatgtgccaccacacccagctaatttttttttattttgttgagacacggtctcactatgttgcccaggctgggttcagactcctggcctcaagtgatccttctgcctcagccttccagaatgttgagattacaggcatgagttattgcacccagccactttccaatctttatcagtgtactcatgtgcctgtgggagaccagcccaacactcagtggtcagttgcatctatcccctgtgagacctgtctccacttcctcagcttctggcctacgatattgggataagtatcaacttgcaaagaatttacatagggttatcctcaaagcatttcctaaagccattgattggaataaaattcaagcttgtatcctagagccaaatgaactggttcataaccattataacagactccaggtggtattcagagaaaattctggctttcctgtggatgttgactctactagaattggtcttaattttgtcagtggtctcccaagaagagctaacatagaatttctcagttaaaagagctaacatggaatgggagactgtacaaacccctgaccttgttaacttggtaaattaattgtctcactctaaaaaaatatcagcaaaggccaggcatggtggctaatgcctgtagtcttagcattttgggagcctgaggtgggaggatcaatggcttgagcctgggagtttggtgccagcctggcaacgttatgagaccccgtctctt

SEQ ID NO: 2279 - DNA, 2138 bp, Homo sapiens
taccccaccgatctcacgagactgaaggagctgtcccccggggggccgcggagcccagagctggagaaagggagttgtttacgcgacctataggtactggaaagggggtgaagagatttgggggcaggaggctgccaggggccgggcaggagccagcgaaatggagaactccctctcggtctcagccccacccgcactggagccagcaagagggaaaaaattccctaaaaagggacacgaggcgtcggcggaggacggggggagggcgctcccccaaggccgttcccctcgtgctccggtcccctccgcggtccaccgcggcacctgcgcccaccgccgccggagcccctacctgcagcgctggcgccccctctgactcagtccgtccgctccagcgaggccgcggcgggggcgtgggagcgagccgcgccggccggggtggggctgcgcctccagggctcccgggggaccgacgggccctgggagccgggaacgaggaagaggcgggaggcggaagtgggggaggggcggtggcgggctcactcgctcgcagctcgcccggcggtcggaggcagcccctgcgagcgcggctactggtacttccaaggcggtcaaaaagttacccgcacccatccttcctccctccgcccagccggactcctctgcaccaccctcgccaccgacgccggtgcgctagtctccgctcgctcggatgcacttgctgcgcccccgccccgcgcagacccgcggcgggcgcccgcgccggttctgcccacgcacacttgatgctctgcgccttttgggcagcgcccacgcaacgactacgcacccgaaccctgcctccggcacccttggccacactcgccacacttacacgcgcgcacttctccagaggacgcacgatgggaaagagagagttgggacccgcaggagggggcagggcactgacccggtgccgcccagcagggcaggtgcaaggcggcggaggacccctgccctgggactcgcccggctgcccctgattcctggctctgggactagacagagccgccgcccaacctaccaagcacactgggcggggtgggcgccgggccggccgggcgggtcagagctggaagggtgggccgctacgccgcgccccccgacgccggcaaggagccagcacctccacggtgctaagaggggcgctgcgctgctggccaggcgggggtggaggggcgaggcggcaactgcgagaggagaaacgtttgccctcttttcgcagcgtctcctggctcagaccagtgctagaagtgtccagtctagcagctcctggaccaagactccgtggccattcccttcctcctgccttccatccacccccttacggtcagagctccgaaggcagcgtggtgacgggtgcggggaggggagtggggggatctctctgagatacttctgccttggggtcactggatcattcattcgacaaacatccgcgagcaagtcaggaactaggagtcatccttgccacctccctctccctcgctgcctatattaaaatacacctccatttcctgtcgattctctttcctaaatatctttccagtccaccattccttccgtttgccccaccacctcccgcctgggctcctaatgcagtaaccttctatctggttttcttttctttttttttttttttgagacggagtctcgctctgttgcccaggccggactgcggactgcaatggcgcaatctcggctcactgcaagctccgcttcctgggttcacgccattctcctgcctcagcctcccgagtagctgggactacaggcgcccgccaccgcacccggctaattttttgtatttttagtagagacggggtttcaccttgttagccaggatggtctcgatctcctgacctcgtgatccacccgcctcggcctcccaaagtgctgggattacaggcgtgagccaccgcgcccggccctatctggttttcttgtactcattctggcccggctacactccattccctgcattacaagtcagctgtcatttcagaacacaagtctggtgtgcccccctcgacccccccgccacgcggcgttgcctaaattcctccactgttagaataaaatctggacgctgatatctg

SEQ ID NO: 2280 - DNA, 2216 bp, Homo sapiens
gatgcatctgagcttcaggagagaaagatggggggcagaggtggtgagaagaagaggaggagatttccatgaagggagaggagcccagtactgagaatggatgggagaggagaggaagagggtggagtgggctctgccccacagtcccccggagccctggctcagacaccttcctccaggcccaggggccctctagcctccactgccctagccccagactgctcacctcctctgccctctaccctcctgtgacagcagggaaactgagacctggaaagggaggtggcatccagatttgggcccctttgtccccttgtaagttcccctgcttccccctgaaccccacaggcttagggagcccaaatggctacagatctggtaaagctggtggcggggtgcttggggagggtggcacaccggttcccagctgctccagcaccccgggctcaacatctcacttctcccacagtctatggcccccacagtggcctgggagcaggattcgtggtcaggcatgggctgggaacccagccaggtgagagccgtggggtcccctccttccctccctcccaggcctcagacggaagaggcaggattggagagattgttggggggaggcgcagagagcctctcaggtttgctggtgtctggcttagtccaagggggggttcaagggtcttgtacccccacctcagctgggaccccaaacctcctcagctcacctctctctctcccacgagcccttccactaagaatggctatggagcaggtagagatgggagtgggggagctggaagccaggattctaggggtatccctgggatggggattcctgagcccctcatctgatccccctctctttcccggacactgaagggggcatgaaaccccaaaacctaggtgaggctcgcccagcccctgcctgcctccctcctcctgactccctcctgccttctcgccccagggttcaggaccttcgcaggtgctgcagcccagccaggatatggaaacgggctgggagcagcggccttcccagtggccggagcccagtcaggattggggagcagaagtggtttgggcgctggcactcttccaggggcaggaaccccaccaggatacaacaatggaaacggaccgggaacccagccaggtcggggccgaaggggctggggtggctgggggagaggtcaggggcccagggccacactctgggtcccaacagatgggctcttgggggttcattcattcacccaatctcccctgagcacccgtcccaagccaggcctcggctggccatggaggacacccaagctggtcaagggtggccacggtctggactcccgggccaagaaccaaatccaactttgactgcagtcaggcctgggagggagttcacacaagacagaaaggcagagggcaggggtcacgcgagacagaaagggagagggcagggctccaggccccagctcatccccactgcaccaccttccacactcctgtgtctgccctcaaacaggtcctgccgctcaaaatggctttggaccaggtaaagagggtggggacggaagcggggagcctggggctgagattctgggcacaggcccagaggaaaggatccctcaccctctcatcttccccccaggctttggagggggtggaaaaccccagaagccaggtgagccactccctgtccctgtctccctgcccatttcctatgcatctgccgctgcttccctagagtccctgatctccccattctctttggctctgtcccctgggatttgggaataggaatgggtggggagtcggggccttcctgggagctggaacccaggcaggtaaggccctggagttctgggagcatggaggtcttaggggttgggggttactgatgtaggggcctggccctggtcctgagcagagaggaagggatgggtggactcacaggaagtccttccccttctcttcccaggcctgggagggggactaaaggctcagagagcaggcgagccccaatctctagcctcccaacttggtctcacacaacaaacctcattcgacaaaccaatccaggcctggagcagtggctaacacctgtaatcccaacagttcgggaggcagagttaggtggatcaattgagcccaggagttcaagaccagcctgggcaacattcccaggctggtcttgaaatcttgggctcaagcaatccatctac

SEQ ID NO: 2281 - DNA, 2615 bp, Homo sapiens
agcgccagccagctcaggctcctatgggtgataactgcactagacacctctccgaagaagccaacagaaactgcatgcagcggcaacatgagcaaagataagtgttgggacccgttcttcgctgccacctccaagtctgaacagcaggctctaaggggggcatgggagcccctcagaaagggccactgcccgtgcctcatctcctgcccgccactccactctttattgtcctacctgactgtaacaggctgcatgctcaacatggtgtcagctgccccaaagagcaccaggaggagacaggggtgccattcggacatgaacaggagctcctacctgaatgtgcagacctccgccactggagctctcggggggaaaacatccatgacagcctccctgagccttgaaacatatgcagaccaagcaggctcaggtgcccgtgtttgcaggcggttttttagaacgtatcatttgtcttatattgatgtacccttcaaagcccgggaggaagtgtggtcttgtggggagctctgtgcaggcaacatgagagtctgtattgtcttcctagctctgccccggttgtcagaggagtccatctgggccacaggggtgaggagccgtcacccctgccttttgtttagccggtgacacctccccagttgtgtggcgggtgatgcagcaataatgcccacgagctcctctcaacaatcaaaacaaaacagagagccactctaaaacagtggctttcttgcaaatggaatatgctgagaatctgtgacatgtgcaggtcggtaagtgagaaggaaacaggaaccaccaatcgattctgacaatgtagaaagcagtggaggtttggggccaggagaacaaaagacctatgggagaggcggtgacccaggaagggtggccatggacttgggtgcatcacctgagccctgtcacttggaaagaaccctaacgaccatcttaatcctgcctgcatagataccttactgtgccgctgctgggtgtgaagcgtggctactaaaaatgttcacttcatttttaagaagtagaacaggttcaaggttattcctgtagacgacagtgtcgctctcgcccaagtacactgtgggaggcttccttagcaggatcgaaaggggtggaattacagtgggcactggaattggctgtggttcacacatgtagacatgactgtgaattccttgttttttttttttttgagacggggtctcgctctgtcacccaggctggagtgcagtggcatgatctcggctcactgcaacctctgcctctcgggttcaagcgattctcctgcttcagtctcctgagtggctggaattataggcacctgccaccacacccagcaatttttgtatttttagtggagagagggtttcaccatgttggccaggctggtctccaactcctgacctcaggtgatccactcgcctcggcctcccagagtgtgaggattacaggcatgagccattgtgcctggctgactgtggattttgtggcagcaaagagttcatcttggttcatcagctaagactgtgctcaagtgtaagccactgagtagacttgtttatgagtgattcttggaagcttgcaaggacttcttttgagttaaaaaaaaaaaaaccttctggtagagttaaacataaattggcttgccctgagagttcgggttttatgtcacgagaggtagttaaatgtgggctgggggcctggtgtggtggctaatgcctgtaatcccaacacattggtagactgaggtgggtggattgcttgagcccagattgagaccagcctggccaacatggtgaaaccccatctccacaaaagttaaaaaaattagccaggcatggtggcatgtgcctgtggtcccagctactcacgagctaagtgggaagatcactggggcccgggaggcagagattgcagtgagctgagagggcaccactgcactccagcctgggtcacagagcaagaccctatctcaaaaaaaaaaaaaaaatgtggggtagacaaatatggggcagggttgctgtaaagggtgttcacgttttattttggaagctgaataatgtagactttaaattgtttttgcaacatagagatctacagctctggactaatggatcagattttgctagttgcaaagatttttgaattttaattgcagtttgctgctgtttcacccacaacaaaagtagaggaagaactcatagcttatatgcagtgatcatgaactctggggctttgtagatgagactaggaaaacttgtgcaggacctgaagttgaactgccttggctcttgttcccatgtgctgggggatggggcaaggacatctcaccaggtatcagtgggtggtctacactatttgagtaaagtcctatccttatagtgttgctttcctgcctggtgacttgactgagtttaggcttagcgacctgcttataaaatggcaagagtacgtacttgcataagcggttaattgacgtaatgcaggtaaatggaacagtaccaaacgcttaataacaaatgcttaataaatgaagatggtggctggcaagtgggggcgaatgtcaataaacaacatataaaaatatg

SEQ ID NO: 2282 - DNA, 2837 bp, Homo sapiens
acttgagatggtgtctcgctctgtcccccaggctggagtgcagtggtgcaacctcagctcactgcaacctctgcctcctgggttcaagccattctcctgcctcagcctcccaagtggctgggattacaggcgccgccaccatgcctggctaattttttgtatttttagtagagacggggtttcactatgttggccaggctggtcttgaactcctgacctcgtgatccgcccgcctcggcctcccaaagtgctgggattacaggcgtgagccaccgcgcccggctgtcccaatgttttattaaccgtgtattgacttcctgaaccctccctggcattggcattgttgtacagacagtgctgactgaggacttaggtcttaccaggggcagccggtaagggtttagtgggtcaggcagccaggcctgccagctacagggtccagtggccctgagctcattttgtggctgaatggaggaatctgggtacaggtacaggttttcttttttttcttttttcttttttttttttgtgagactgagtcttgctctgtcacccaggctggagtgcagtggtgcgatctcagctcactgcaagctccgcctcccaggttcacgccattctcctgcctcagcctcctgagtagctgggactacaggcacccaccaccacgcccagctaattttgtttttgtatttttagtagatacagggtttcaccgtgttagccaggatggtctcgatctcctgacctcgtggtcttgatcttctgacctcgtgatccacccgcctcggcctcccaaagtgctgggattacaggcgtgagctactgcgcccgaccgcttttttttttgagacacagtgtcactctgtcgcccaggctaaagtgccgtggcacgatctcggctcactgcaacttctgcctcccgggttcaagagattctcttgcctcagcctcctgagtagcgggaattacaggcacatgacacacacctgactaatttttgtatttttatttatttatttttttgagacagagtcccactctgttgcccaggctggagtgcagtggcgcaatcctggctcactgcaacctccacttcccgggctcaagcgactctcctgcctcagcctcccaagtagctgggattacaggtgcctgtcaccatacctgactaattttttttttttgtatttttagtagagacaaggtttcaccatgttggccaggctggtttcgaactcctgacctcaagtgatctgcccgtctcggcctcccaaagtgctggaattacaggcatgaaccaccgtgccaggtctaatttttgtatttttagtagagatggggtttcaccatgttgcccaggttggtctcgaactcctaacctcaagtgatctgccctcctcatcctcccaaagtgcagggattacaggtgtcagccactgcatctggcctgggcacagtttttcagtgggagcccagagggcactgatgccctcatttctccttaccaatatcaaggatgagaagaggggtccaagcaaagagactaacggtggggaagtgggcagccagtagacagctgggcccagacctgttcttccccccaacatccttcccctctcctcttctctttacaatttaacttttttctttttttgagacagggtctcactctgttgcccagcctggagtgcagtggtatgatcatggctcactgtagcctcagcctcctgggttcaggtgattctcctgcttcagcctcatgagtagctgggactacaggtgctcaccatcacacccagctaattattattattattattttttgaggcagagtttcattcttgttgcccaggctggagtgcaatggcatgatctcggctcactgcaacctctgcttcccaggttcaagcgattctcctgcctcagcctcccgggtagctgggattacaggcatgagccaccatgcccggctaattttgtatttttagtagagacgggtttctccatgttggtcaggctggtctcgaacttccaacctcaggtgattcacctgccttggcctcccaaagtgctgggattacaggcgtgagccactgagcccagcctgctattgttttttaattttaattttttgtagagatgaagcttttgccatgttgcccaggctggtcttgaactcctgggctcaggtgatccacccaccttggcctctcagcgttgggattacaggcctgagccactgcacttggcctacagtttaatattttaaaccattttttccttcattatagaaaagttcaaacaaacacagaaataggatagtatgataaactccactagccagcacctagcatcaacaattagcaatagttaatcagatttcccctgaagacctccactgtcctactattggatgattttgaagtaaatcctacctagacttatttggaaatactttattatgtctctaaaacataaggatgtattgtaacaaaatctttcaaagctaaaactcctatcatctgcaaacctttgggtaaatccattaatacatggctcagatgagcaaaccagtgcagtggttgctgaaaactgtaggccagatggggctggtggtcttggagccactggaatgagggcacgtgtgttaaaaatacagatccccagccggtgccttgggtcacgcctgtaaccccagcactatgggaggctgaggagcgaggatcactccaggctgggagtttgagaccagcctggtcaacacagggagaatcccgtctctacaaaaaatatcgggctacagggcgagaccctgtcgaaaaaaaaaaaaaagg

SEQ ID NO: 2283 - DNA, 1968 bp, Homo sapiens
agcttcccgagcgagccctgcggccgccggagcagctcccgcggcggagcaggagccggatggtcagaggagcccggcagccccagcagccgcggagtcgcctggcccccagactgactggcacagtggagaaaccgcctcgaaaacggagaagcagtatcagaggttctggtgatagcagtcattcacaatctcaaggggaaagatatcaacatttcactgaaaagactgaatttgctcttaaagaaatcatgtcctctggaggtgctgaagatgatatcccacagggagagaggaaaacagttacagatttttgttatcttctggataaatctaagcaactgttcaatgggttaagagatttgccacaatatggacagaagcagtggcagtcctattttggaagaacttttgatgtttacaccaaactctggaagttccagcagcagcatcgacaagtcttggataatcggtatggcttgaagcgctggcaaataggagaaattgcttccaagattgggcagctatactatcattattacttacgcacatcggaaaccagctatctgaatgaggctttttccttctattctgcaatcagacagagatcatattattctcaagtcaataaagaggacagacctgaattggtagttaagaagttacgatattatgcaagatttatagtagtttgtcttcttctcaacaaaatggatgttgtaaaggatctggtaaaggaattgtcagatgaaattgaagattatactcaccgatttaatactgaagatcaagtggaatggaacttggtgcttcaagaagtagcagctttcattgaggcggatcctgtaatggtattaaatgatgataataccattgttatcacatcgaatcgccttgctgaaacaggagccccattgctggaacagggcatgattgtgggacagttgtctctggctgacgcactcattattggtaattgtaataatcaggttaagttcagtgaactaactgttgacatgttccggatgttacaagctctggaaagggagccaatgaatttagcttcccagatgaataaaccaggaatgcaggaatcagctgacaagcctactagacgagaaaacccccacaagtatctgctctacaaaccaaccttcagccagctatataccttcttagcagcgtcttttaaggagctgcctgccaatagtgtgcttctgatttacctgtcggccactggcgttttccccacaggtcgttctgatagtgaaggtccttatgattttggaggtgtacttactaatagtaaccgggatattattaatggagatgccatccacaaacgaaatcagtcccacaaggaaatgcactgccttcatcccggggatctctatcctttcaccaggaagccactgttcatctttgtggattcgtctaatagtgttgcgtataagaatttcacaaacttgtttggacagccactagtctgcttgctttctcctacagcatatccaaaagctttacaagatcaatctcagcgaggtagcctcttcactctctttttgaacaatcctctaatggccttcctatttgtctctggattgtcaagcatgcgcagaggcctatgggaaaagtgtcaagaatatcttcgaaaaatcaaccgtgatattgcccagctactgactcattcacgttcaatagatcaggcatttctccagttttttggagatgaatttcttcgcttgctcctcacaagatttatcttttgttcagccaccatgaggacgcacaagatttttcgggaaacacgaaattatccagaatcatatccacaactgccaagggatgaaacagtggagaatcctcatctccagaagcacattttggaattagcatccattctggatgttcgaaacgtgttctttgagaataccattgatgactattaaaacaaaaaccctgttgtcg

SEQ ID NO: 2284 - DNA, 1783 bp, Homo sapiens
agttaggtcatgaggctttggccttgacaccaagggatgctgtctccttgccggaagcagctcaccaaagccggcagagaacccaggttccgtggggccacgatgtggggctccgcgggcgccccggcgctggccgacttcctgtctcctgggtcagatgctgctccgcactgcagctatggtcgcatgcagtgcctgccgaagcccgcagcaggaatgctgccttcggtgattttaatttcacttttctacttctctcaataacaaaatccgcgtttcaaactccagggaaaagaaaacggaattggctccaggaggatctgcaatcaccaccgggaactttgggaggctgggaagatggagccaaaccaatgtgtggggtggaggtgcggatctggggcggccggcctctcctacaggtctcaggtccgcaggcctggcgtgccagcacctgccacgggactggaagcccattccttgacaacgcctaaggggatcccgttgctagggctgttgccaaggcggggcaacgaggaggggctcgcttccgggaggacggcaattggcaacccggaagcggtcggtagtgcggcgctgtttaaagatggcggcggaggaacctcagcagcagaagcaggagccgctgggcagcgactccgaaggtgttaactgtctggcctatgatgaagccatcatggctcagcaggaccgaattcagcaagagattgctgtgcagaaccctctggtgtcagagcggctggagctctcggtcctatacaaggagtatgctgaagatgacaacatctatcaacagaagatcaaggacctccacaaaaagtactcgtacatccgcaagaccaggcctgacggcaactgtttctatcgggctttcggattctcccacttggaggcactgctggatgacagcaaggagttgcagcggtgagaagggtgggcactgggcaccgaggcaggtgggtgtctacctcctccccgggcgagtaggatgtgtctcgagtagggtgtctccctccttcccgggcgatgggctggactctggccttgccaggcggggcagtgctgtctcggccctggcgtctgggctggtcgaggagcccatgctgggcccgcctttccatcccacccccaggttcaaggctgtgtctgccaagagcaaggaagacctggtgtcccagggcttcactgaattcacaattgaggatttccacaacacgttcatggacctgattgagcaggtggagaagcagacctctgtcgccgacctgctggcctccttcaatgaccagagcacctccgactaccttgtggtctacctgcggctgctcacctcgggctacctgcagcgcgagagcaagttcttcgagcacttcatcgagggtgggcggactgtcaaggagttctgccagcaggaggtggagcccatgtgcaaggagagcgaccacatccacatcattgcgctggcccaggtcctcagcgtgtccatccaggtggagtacatggaccgcggcgagggcggcaccaccaatccgcacatcttccctgagggctccgagcccaaggtctaccttctctaccggcctggacactacgatatcctctacaaatagggctggctccagcccgctgctgccctgctgcccccctctgccaggcgctagacatgtacagaggtttttctgtggttgtaaatggtcctatttcacccccttcttcctgtcacatgacccccccccatgttttattaaagggggtgctggtggtg

SEQ ID NO: 2285 - DNA, 2037 bp, Homo sapiens
taagcaagtgaagatccatcgttatgcgatgaacagtatttccatgaagttctgcttagtgagaatagagatcacatgctcccttccatttttcaaacattatttcttgttcttgcggtctggaagaaaatgactgaaagattactttgtttctctttgattcactttaaaagatgtgggaaagggaacgcgagctgcccagctgcccgggagaccaggttaccttcctttaccccggaaggcagcctgccctactacagcgttgcctcatgctccgatcaccacacacatcaatggcaggaggagagggtcaggataactcgggacggactcctcccgggagctccctgggcgaaggcggtcccatcggggaagcgggattccctcctccagtagggaagaagcaccctcagcaaggagactgccgaggcgtggggacgctctgctctgtgtttgtggaaaccaggcgctcgcctggcacagggtctcgcaccccggtctcggtgcagccttgtgtgggtctggtgcttgggagggcgtgttccccacgtgcctactgaggagccgctccctggctcagggctcctcctccacccaacaccagcatctccacatggtcaggtgcggttttaaaagccgcgttctcaagatattcttcacgtatcatgacatgtgcacaggcagagtgccaatcaagtcctttcagagtactcggagatccagtcactgcgttgggtgtactcggagatccagttgctgtgttgggtgtactcggagatccggtcgatggcgttgggtgtactcggagatccagtcggtggcgttgggtgtactcggagatccagtggatggcgttgggtgtactcggagatccggattgatgctgaatatagggggtcaggaagatgcagttcctgaccgctgggtgtggtccccggaacagccagtctgcgctgggtgctgaggccactgctgtcaatgaggagagacctgcttttgcaggtggatcagagagttctgaactcctctgtcatttcattaggaaacaggttttcaggccctgggctgcagctcctggtgctgagaactttccagaaggttggtggctcctgttctacgccttgtcagggaagatgtgggttcgccccaggtgctccagaaaggtcgtgttctctatggaatgaagacgggtgggcataagcgtgggtccggggccaccctctgtcgtccgccggcgtgtttctcatccagccacgtctcggaaggtctgtgactgctgaaaacattctgtgcatgaacgttggggaaggaaacccacccagaggaggggcaggcgccaccccaggcgtcagagcaccaagccgcagagaacagaggcagcaggtgcccgggacacaccagggagaccgcaggagcagcccgtgtcttctgtggctcagtcccgcgagaaactggaggccagcgcttcacagctcccatttgcagagaccagctcccgtgaatgaagcaaacaacctgatgtttgcatttgcaagaggaactatgattgtgccagggatggggtcttcaggttgtgcatgagagtctggggtccatgcgtggagagggagtggtgtcagagggtcagagcccatgggcggttctgggacatggaagctggtgtcgagtcagtcggggacgtggcctccccagtacagccagggtgagtgtcctctctctctaaggcgaggcaggaggggcctcttgtttctcagctcccgcagctctggccaccccaggcttatgacacacggtaatggatatttgtgaatgtctctttggccaaatgagtctggaaaatgatgtgctaaggtgctcttgggattgttttcatggatcccaggttcgtcgtgtgtataatgtggcaatctgcaccgtaaaccccgagctgcgcagcctggcgcggcgtgcgtccgtaacgcatttaaccactatttattgttgttattatcatttttattattgtcattatttgggtaatagtaaagaagtgtgctt

SEQ ID NO: 2286 - DNA, 1859 bp, Homo sapiens
tgcacgtgctatttcttctatttactatgccttccttctctatctttgtttggctcagttctactaatttctcaaggtcttatcctttgcaggatgctttccctgagcccatcatgtttcctctgggatccctgccttgtggcctttttccatcacagccctgatcactgtgggctatcactgtcaggggactgtgtgagtctgtctgccaggactgtaaactcctcgaagggagtattagaaatgttctggtcatcactgaggaaagctttgaaaatgattattgaaggagagtggtgggctgcctgtatacccacacttacaggtatctccctacacagatgtcacctgtgagaatcccagatgtcctttctcccagctcccagcactgccctcccagctagacctatgtgagcaggtgtttgggctctcagccttgtcagtagcccaggctgtggctcagacgaactcctactacggtggccagacccctggggctaacaaagtgctgtttgttaatggggacacagacccctggcatgtgctaagtgtaacacaggctttaggatcctcagaatcaactcttcttatccgcactggctcccactgcttggacatggcacctgagaggccctcagactcccccagcctccgcctagggcgccagaacatcttccagcagctacagacctggctcaagctggcaaagggtgaagtctgaatctcataccctttccactccctgcatggtcacctcagtcctggacatacttgttcactgaacaaaagaaagcagcttgttttgaaagaagaaactcccaggaattggaattcagcacctgttccgcacgtaattggcatgtgtctgcaaacatccttattcccaacttaaagtgctttattgcagagagttatggaaatataagtggatgattattctcattgtaaatattggtattttgaatgttaaatgtcaaacaaatgtgacttatgctggtgccctcgccctgctgatcagattctggttcaaattctgccactccagctcctgggttaggggctttgctgtaagtttctttttctggactttagatcctgaacctgtccttgcttctcagtttctctcactgtacccctttccctcagtctcttcctctctctttcccctgtcactatttgtctttctaatctccttctgtttctctgaatatcttcatttctatctctgtgtttctgtctatttctctgtttatctttctgtccttcaatctgtgtttttgtttctggctctccgtcagtgtctttttctctcctctctctcttgctctgccatggctatttccactgctctatttctgactctcatttttggtctctgtgtgtctcctagtcactttctttctcactctgtctctgtctctatttctgtctctcctctgctgtgtcctcaatctctctgtctccctgaggctctatttctgtctctcctctgctgtgtcctcaatctctctgtctccctgaggctctatttctgtctctgatgctcttcttctgtgtctctatttctcttcctgtcacttaatcttttccttctctatctctcttatttagtcttccttccacacccttcactcaccatcttttcccacaatcaaatatcactccctggtacttccagcttccaactctagggattcatgattctggtggagattccttcttccagggcctgggaggatagggctaatcccaagggtgcctgcttaggctatgttagctgtgacaggaacctgccatagatttgcactgttctttcctaaagatcaattattttcagcaataaatacttctcagctttt

SEQ ID NO: 2287 - DNA, 2358 bp, Homo sapiens
aactcgagagcagcctccatgggcacacaggagggctggtgcctgctgctctgcctggctctatctggagcagcagaaaccagtgagtctgggagtcggggagagctggctgggagaagagctactgaagccccagggtgccaccctccccgagattccagaagagcaaaggggccggggatgaccccatcgccttctaagcccaacaggggaaaggctcagcggctggcaaaggaaggaaccaatagtgtgtgtggagggagggtggggactccacagggaaaatgctaaagaggggctgcctctgtggctgtggtcaggagccactgtcctacagagagggcactggcctgggagctgacacttcagaagaggaaaggactccccagagccccacccagcagaggggcagtggcgggcagtggacgtggtcctagactgcttcctggcgaaggacggtgcgcaccgtggagctctcgccagcagtgaggacagggcaagggcctcccttgtgctgaagcaggtgccagtgctggacgatggctccctggaggacttcaccgatttccaagggggcacactggcccaagatgacccacctattatctttgaggcctcagtggacctggtccagattccccaggccgaggccttgctccatgctgactgcagtgggaaggaggtgacctgtgagatctcccgctactttctccagatgacagagaccactgttaagacagcagcttggttcatggccaacatgcaggtctctggagggggacctagcatctccttggtgatgaagactcccagggtcaccaagaatgaggcgctctggcacccgacgctgaacttgccactgagcccccaggggactgtgcgaactgcagtggagttccaggtgatgacacagacccaatccctgagcttcctgctggggtcctcagcctccttggactgtggcttctccatggcaccgggcttggacctcatcagtgtggagtggcgactgcagcacaagggcaggggacgaggggacctacatttgccagatcaccacctctctgtaccgagctcagcagatcatccagctcaacatccaagcttcccctaaagtacgactgagcttggcaaacgaagctctgctgcccaccctcatctgcgacattgctggctattaccctctggatgtggtggtgacgtggacccgagaggagctgggtggatccccagcccaagtctctggtgcctccttctccagcctcaggcaaagcgtggcaggcacctacagcatctcctcctctctcaccgcagaacctggctctgcaggtgccacttacacctgccaggtcacacacatctctctggaggagccccttggggccagcacccaggttgtcccaccagagcggagaacagccttgggagtcatctttgccagcagtctcttccttcttgcactgatgttcctggggcttcagagacggcaagcacctacaggacttgggctgcttcaggctgaacgctgggagaccacttcctgtgctgacacacagagctcccatctccatgaagaccgcacagcgcgtgtaagccagcccagctgacctaaagcgacatgagactactagaaagaaacgacacccttccccaagcccccacagctactccaacccaaacaacaaccaagccagtttaatgcttggcagcactgctctcaaattgtgatgctcctgcctgcaaggcatcagctcggtcatccagctctgacagcttctggtccctctccaggaccttgtccacgttcacacgtatgatgtccaccacctgaggagggcacagaaacaaagctgctaagcttcctgccagagacagaggaaaggacaacaaccagagaatcacaagtctggccctgtgcaactctaaagggtgctttgcctctcagggcctttgactattctcctacgaaaaaaggagaaaagataagaagttcccttttgtttccaaactcctagatttggaaactttcagagaaacagctatctacctacctcctccacttgtgcctgggtttgctgtagtcgtctgttactggtcatgttaggaggagggccagggggacccccacctggggcagtcccttctgtcccttcagcaggtggctgagctggagcagacctgtggaaagacatgtgcagagtacacaaagtgaccaagacaagaaaggagctgggcgtggtagtacacacctgtagtctcagcctcctgagtagctgggagtacaggcacatgccaccatgcccagctaatttttgtattttcagtagagcctgggcatcatagcgagaccccatctct

SEQ ID NO: 2288 - DNA, 2278 bp, Homo sapiens
ccggggaactcagggcgcgcgaaatcgggctcgggcgcgacaattgaatcgcggggcgccccgcgcgcaggcgcggagcctgacatcctccccggcggctcgccaggccctcccccacccggcgcgctcgaccccccgccgggctccggggacgcagcgctggtcccggctccagccggatgtgtgccggggaacgattcccgagggttaggtggaaggggaggccctggatcccgggacagagtgcgggacatgcgtgcgcccgggctggccgcgcgggaaagttttgcaaagttcccgagccccgtgcgcccggcccgggctggcaccccgacccggcccgcccgctcacctctccggtcgccgcgaacagcttgtctgcctgcgcgcgtggcccggctggggatggcgatgaaaccgcgtgcgtggcccggaccccgcgcggacttgcgtgcgacccggagcgcccgctcggcaaacgctgcccgccgcgctgccagctgctctgatttttttcccgcgaaaactcggcatttgggagttgcggggccgcaggaggccgtgccgggggcgggcgcctgcctcctgattggccgacgcagtggcgggaagcgagaaagagggtggggggcgcccccgcctctgtccacggcgcctccgcctagtgggccacggctccgcccagccctgcgcgctctgctgggcgcgcccagcgtgcaaaggggctgcgtggcagggcctggtcaccccccgcacgtggacaccccaggagccttggggacccccagggtacagaccccctgaactcttaagtccaagtccgttcgcagccccccactcgcacgcattgaccagtaggtctaagaaggccggaatcaatgtgtaaatactgcgagggaatgtggggggcccctaggagaccacctgcaccctgatggctcgcccgatcgccccaagccccactgcctggcgtcagggcctgccagggctccccactctacccacccgcagggcttgtttgctgtcttttcccgcctcgttttcccgccttctccaggctgtccaggcgggcagggctgccctgccccctccgccctgtctgttccactctgaccagtcctggcgggcacaggagtgacctgtgctgggcacctacaaagcagccggacaggttgctcagagctgcagaacccagcggtgtacatggcagacccagttggtggtctcagggagggaaaattcctatctgggggagacaggcaagaaatgaataactaaagcagataatttcagatgattccttataggagagtgaccagcagccatgtggtgggaggcggggagagaggatactctctcactggggccactgcggtgggcctctcagagaagatgacatttgagctggaatcggagatgagactccaaggacagatgggtctaggagggaaagtcaaacccagaggccggaaaaggcttagaggtgtccagggagcaggaaggggctggtgtggttggggcccactgagcaaaggggagggggagttgaggtcagaggggtgatatataataccttgaaggccaccggggaggactttggtctttcccttgagagctgtgagcagaaaaatgttgagttcccacttagctttttacagtttcttcgtcactctattaagtctcctctatctggtcagtgggacttctgctatgtccctaatataggagacagatcatggcccccgaagatatgcgtctctagacccccacgtcctcgcccccaggatctgtgaatacagtgccttacacagctaaaaggactttgcaactttgcaggtgtgattcagttaatgattttgagttggggagcgtctcctgggtgatccaggtgggcacaatgtccttaaaaggtcctaataagtgaaacagggatacaaaaggtcaaagtcaaaggagatgggaaagtggaagcaggctttacaatgatcaggccaagggccgggcgcgttggctcacacctgtaatcccagcactttgggaggccgaggcaggcagatcacctgaggtcaggagttcgagaccagcctgactaacatggagaaaccccgtttctactaagaacacaaaattagcctggcgtggtggcacatgtctgtaatcccagctactcgggaggctgaggcaggagaatcgcttgaacccgggaggcagaggttgtggtgagccaagatcgcgccattgcactccagcctgggcaacaaaagcaaaactcagtctc

SEQ ID NO: 2289 - DNA, 2386 bp, Homo sapiens
ttttttgagacggaatttcgctcttgttgcccagcctggagtgcagtggcgcgatctcagctcaccgcaacctccgcctcccgggttcaagccattctgttgccttagcttcccgagtagctgggattacaggcatgcgtcaccacacctggctgattttttgtatttttagtaaagatggggtttctgcatgttggtcaggcttgtctcagactcccgacctcaggtgatgcacccgcctcagcctcccgaagtgctgggatgacaggcgtgagccaccgcgcccggcagcagttgctaacattttcacacagcttcttgtggagaaggcccctttccactgtgaagtgtgaatgcgtcaaggtggagcccctgccccggaggcctctcctctgtcagggtcagctgtggcgctcggggctgctgtcttcaggggcggtttccaagtgggatgagcctgatgtggcccctgtggctgcttccttgagactcagtggtatcagccgtttgtttttagatgactgattgaagtgagttatgtgatcataatatctaattgtcaacaattgactttttttcctcgaagagggattttggcaacaaaacttgccagtggtcctgcaggctgccgtccacgaggtgtgcatatgaggctcaggaggcatgtgcgtttcctgagcgccttggcggacagcctcaggaacacaggcagcaggtgctgaggtcacaccccagttctgtgtgagctggcggctcgtctcagcatcctgaataaccgtcctggaagcacacaggaggaaggtacctgcagccctgggtgcgcaggcacaaatgaccacaacactgaaggcgtggcgggaagaggtgcatcgggcagcgcagtggaagggacgcgctgggcgtttgggttgaacagaagttaaggacttcatgggaaggagatggggggtcttgcaggcagaggaagttccttttatacctagagtgcttttgtttgtttgtttgtttgtttgtttgttttgagatggagtttcgctcttcgttgcccaggcaggagtgaagtggcgcgatctcggcccactgcagcctccgcccgccatgtttaagcgattctcctgcgttagcctccctagtagctgggcttacaggcgcgtggtaccacgcccagctaatttttgtatttttagtagagacagggtttcaccatgttggccaggctggtgttgaactcctgacctcaggtgatccactcacctcagcctcccaaagtgcctggatgacagtcgtaagccactgcgcccagccccagctacgttgtgtttttttttccccctgtagagatgggttttcgctatgttgcccaggctggtttctaactcctggactcaagtgatccacctgtctcgactcccaaagtgctgggatgacaggtgtgagccattgcgtccggctggaatttcttatggttcgtttccttaggttaaagtttcagaagtaggatttttgaattaaagaaactaaatactgtctatggcgcttgatacatcttgccaggcagttatcagacagggttgtactggtttgcgccaccccagaacgtgtgcaaggcctgtttgtggaccctccttggcctggctctctaggtcatccacctgcgtgtgctcacagagcatatggatttttccctgcggtgccttcacttgtggctggaagagccttctctgtgatcctgtgtcctgggtgctctgttggcctccttcttgccaccgaggaagacacggaggctagagagggctcactgaacagtgaaatgattggaacctaaggagcttcagcagaaggtgtcatgatggggctaggctctcccgagggctgtgtggcctcagcgtcttgttgggcagatcctgctccctgacacagcggggctaagagccagcctgtgtcacacacctgtgaattaacatgcctggctgaccctcactggagaagggctacacgtttgtgacgaaagcagaagaggtgtttattgtagaccaaatccaagctgtcattttacttttattagaaattatttgggatttggctcatgcctatgatcccagcactttgggaggctgaggtgggagaatcacctgagctcggtcgtttgagactgccttggcaacatggtgagacctcatcttctactcaaatttaaaaaattggccgggcgcagtggcgtgcgcctgtactcccagctactcgggaggctcagttgggaggatcgcttgggcccgggaggtggaggctgcagtgagcccagatatgctcatgaagcactgtgggtttctcctgcagtgcaccaccgcactccagcctgggtgacggagagagaccccatctcaac

SEQ ID NO: 2290 - DNA, 2332 bp, Homo sapiens
gacacgtcccccgggcgccactgcagagcctgtccgtcagtccctaggtatccgcactgctcaggggtatggggaggatgtcaggcaggaccagcagcagctcctggaggggatctcagagctggacatcaggacagggggagtcccctcacagctgcttgtacatggagccctggccttccctctggggctggatgcctcactcaactgcttcctggcggctgctcactatggccggggccgggtggtcctggctgcccacgagtgcctgctctgtgctcccaagatggggcccttcttgctcaatgcggtgcgctggctggccagaggccagacaggcaaagttggggtgaacacaaatctaaaagatctgtgtcctctcctatcggagcatggcctgcaatgcagcctggagccccatctgaacagcgacttgtgtgtctactgctgcaaggcgtacagtgacaaggaggctaagcagctgcaggagtttgtggctgagggtggggggctgctgattgggggccaggcctggtggtgggcctcccagaaccctggccactgccccttggctggcttccctggtaacatcatcctcaactgctttggcctcagcatcctgcctcagactctcaaagcaggctgcttccccgttcccacccctgagatgagaagctaccacttccgcaaggcgctctctcaattccaggctatactgaaccacgagaatgggaacttggaaaagagctgtctggcaaagttgagagttgatggtgcagccttcctacagattcctgcggagggggtccctgcttacatatccctgcacaggctcctgaggaagatgctacgagggtctggcctcccagctgtgagccgggaaaatccagttgccagtgactcctatgaggctgcggtgctctccctggccactgggctggctcactctggaactgactgctcccagctggcccaggggcttggcacctggacctgctcctccagtttgtacccctcaaaacaccccatcaccgtggagatcaatggaatcaacccaggcaacaatgattgctgggtgagtaccgggctctacctcctggaaggacaaaatgcagaagtctcactgtctgaagctgctgcctctgctggcctgagggtacagataggctgccacaccgatgaccttaccaaggccaggaagctatctcgagcccccgtggtgactcaccaatgctggatggacaggactgagcggtcagtctcctgcctctggggcggcctcctctacgtcatcgtgcccaagggcagccaactaggccctgtgcctgtcactatcaggggagctgtgcctgccccatactacaagctgggtaagacatcgctggaggagtggaagaggcagatgcaggagaacctggctccctggggagagctggccacggacaacatcatcctgacagtgccaaccacaaaccttcaggccctgaaggaccccgagcctgtgctccgcctctgggatgagatgatgcaggctgtggccaggctggcggctgagcccttccctttccgccgtcctgagaggattgtggctgatgtgcagatctcagctggctggatgcattcaggataccccatcatgtgccacctggagtctgtgaaggagatcatcaatgagatggacatgaggagcaggggtgtgtggggccccatccatgagctgggccacaaccaacagcggcatggatgggagttccccccacacactactgaggccacctgtaacctttggtcagtctacgtgcatgaaacagtcctggggatccccagggctcaggcccacgaggctctgagccctccagagcgggagaggagaatcaaggcccacctgggaaagggagcccccctgtgtgactggaatgtatggacagccctggaaacatatctacaggtactgagcagaaattctgggagaaggggatgaccagacccctcagtcatgtagcgacctggatcccagtagccctccacctccttcgccactccaccagcctggacctccacctcccctggaaatgagagggactgggccgcagggtggtgcttcttgggttatacccctctaaggcagagagaatggcacctgtctcactcaccttctgattttgcaatgtaagaggaaatgaaaaatattatgaaaaaaatagaaatatagcatattattcaagggcagaaactctgttagacattcctgcagctgaatcacagctcttgccctcattggttttgttcttggtctcctaataagtgttccataaatggtcattgctttgtt

SEQ ID NO: 2291 - DNA, 2105 bp, Homo sapiens
attttgactgtgatgatgtttcttaagacacacagagctgcacgccagaggggtgaatttttactgggtctgcaggtaagcagctgcacagacagatgtgcgggatggtctcactttaagtctgcactgagatctctcttctactctagacagactggaagggctgcgcagaaagcagcagggtggccccccagctgtgggctctgttcccagaagtcccagcggaggacccagggctcaaatggttgggtcagatgaaagtcagaatgggatgtgttagggaaggctggacaagaggggcccggtatcaggagcccacatctagagaaggaagacaggtgcttgactcatcccaccctgcccaccacacccacctctcctggcactgccgctggcgctgtgtggcacccggactccagacagacggaggctgccaccactgctgatgtggtctggagccaacagcatggccccccgccttcctctgagacatgcactgacgcctgcattccaggcattgctgttcttcccattgtctccccagtcatccagccaggggccagcacagacacctcccccatccacccgactgagacttgggagaaggctgatctacccagaggggacaggtcgcagtgcatcctgagtgctctcctggccgagtggcctgtcccacgggggagcatcctccatgccgcccttcagtccgaatgtgggtggttcgagactggcccaccttggggggctcagagaacagtggaagaggaacgcagctgtgggaagtgctcgtacctggcaggcgcatggcagtggtcaggggcccggacagagccatgccgatctcggtcatgccataccgctccagcagggtgtggcccgtgatgttcttccacttctccagcactgggaggggcagggcagctgagcctgagaccatcagcctacgcggcacaaccaaaggcaggtttagccccttgggacgtggctctcgcgtgcaaaggtggcaggtttagcccctcaggacgcggcccttgcttgcaaaagtggcagctccttcacgagtgcaggagccccaggccgtgggtacagcaccactgtgcgacacccgggaccaacgctgcagtctgcgctacggcgtgactttgttttttgaaaacgatctgttgggtgtattttagaaggaagcaggtccaacagctagtgagggtaaacaatgtgcttagggtccgcggtgtcccctgcaaagttcctgcgctgttcacaaccacgctcaagaacagcagtgaccgtgcagctgccgaccacggagctgatcacgggtgaacagccacggcgctgcaggctgcggccaggcacatccggggactacagccggctcagcttgcaggctctgcagcagaacgcggacatgggtgaatggccgcggcacccaaggggtggggccgggcacacccaaggggctcagaaccacccgcagaactgcagccatcttggcccacagggtcagctcaggcttggcaggagaacacgggccctgagaactccgagtccccgcgctctcacacagcatttcccgcagcctcacgggcagtagggaaggcgcttttgtttgcggtctgagcggagtggtccctgctgctgcccctgctttacgaggaggcaccactgacaggacccccgctgggagatccagatggccgaggtctcattgcctctgtcaccccagaaatcacctgatcctctccttcactgacctcgttcttgcccttggttccttagatttggtaaaacgttgtgctcaccctgctcagctcggggcctgcccagccccagggtatcccagcagtagcagcagcaaaaccatgggctccggtggcctcacagaaaaggggcaagggaacggcaaagagagcgaagcggttcagacatgtgccttggacaacccggaattctctccaggaacaaaggtgccgcttccctgtgcacttcctggggactgggaggagcgcgcggcagccacagacacacacatcccactggaaactggatggcagtggagccttcagttcctgcagtgcaccctccacgccacccctccctctcac

SEQ ID NO: 2292 - DNA, 2624 bp, Homo sapiens
agcttaacgggaaccggcgcccggaatgtcagcgtgtgaagtaggcgctggcaacgcggggttacccgctgttattgaggagtaacggcccagcggaccacccaggcttgaggcagcggcgggaaccactcggtttgctgcgataccatggaaggaggcgggggaagcggcgacaaaaccacaggggtattggccggctttttcggagccggcgaagcaggttactcgcacgcggatttggctggcgtcccgcagtcaggacctcgttctgtcacccatgttggggtgcggtggcatgattatagttcactgaagcctggcactcctgagctcaaacaatcctcccctctaagcctcctaagtagctgggaatctagtaactggtatgaaccctctgtctccttatttaaatgtggatccacgatacctcgtgcaggatacagatgagttcattttacctaccggagctaataaaacctggggcagatttgagctggccttctttacgattggagggtgttgcatgacaggggctgcgtttggggcaatgaatggtcttcggctaggattgaaggaaacccagaacatggcctggtccaaaccaggaaatgtacagattttgaatatggtgactaggcaaggggcactttgggctaatactctaggttctctggcgttgctctatagtgcatttggtgtcatcattgagaaaacacgaggtgcagaagatgaccttaacacagtagcagctggaaccatgacaggcatgttgtataaatgtacagtgtcagagatggctttggattccccgttctgtgtgctgctgtctggctcctgaacccagctgtagaggtgtgtgtcaatcccaactggtgaagtactgagaaggagctacacaaaaggcagcaaagtattagtaagtgtacctctgacattttaaccacctctgacttttccatggaatggacaagtagtagtctctgtcagagctacattttaaaggagaaaaagaaacgtgaagtcatgaactgtttatttatgctgttatttttgtgtttactcacctcatttatattgacttgtaaattagtaatttctgaactattatttatcaattcattgcctacatgtcagcaaacaaattttcttcttaataaagaatccagttgctgggcacaatggttcacacctgtgatctcagcacgtttggagggcaaggcgggaggattccttggggctaggagttcaagaccggcctgggcaatatggcaagatttcatctctacaaaaaaatgaaaacattggctgggcatggtggctcattcctatagttcaggctactgaggagcctgatgtagggggatcacgtgaccccagtagtttgaggctgcagtgagctatgatcctaacactgctctccagcctgggtgacacaccaagttgccatctcttcaaaaaaggaatctagagacatcagtgtgtgcacaagcatggtttgtgaatttggaagtgtgtatgtgcatagttgtgctcaagaatgtgttgatgattataccttctcagaatgaaggtaattttttttttttctttttttttgagatggagtcttgctctgttgccaggctggagtgcagtggtgctctcagctcactgcaacctctgcctcccggcttcaagcagttctcctgcctcagcctcccaagtagctgggactacaggcacacaccaccactcccggctaattttttgtgttttagtagagacggggttttgccgtgttggccaggatggtctcgatcccccgaccttgtgatccacccaccttggcctcccaaagtgttgggattacaggtgtgagccaccgtgcctggcctgaaggtcatttttataaagatctctccacgtcttagatttgattcttcctttaaatatttttctcattgacatttgaaagcacctgaccttatataaaatgaacaattttcataactccataaaaggagaattatggcatcatctatttctttctcttgtctcataaatctaaaccatcaacctgcttatttttgtatactgtcacactgtgtattccctgcattgaatgcctgtctgttgacattatctgtaaaaattgtgggaagttttctgcaccctgaaatttctgttatgcggattaaatatccactatccatgtttttccaagtcttacagtagaaagggtaaatgcagccctcacagcagcctgttgttcgtcctgcaaatgtgtttccatcacattacacaaagcctctttgtcttcgtggttctaccctactaataagttttttaaaaaattatgtaatgtgtgtatatacaaatacctatatgtatgtgtgtacacatacagctgatatctgctgagattatgtatgcatgaactatagaattaacttgtaattttaagaaaataaattattttgtaaagataaatctcatgtttaagaagaggaattacagttgaatcatttagggatgcctcagcctaaacataatatggaaaaagccataaccaaaagtcattttagagtactgctaggttactcaacctatcatcacatttaattaaaatgtcagtttgaaccatg

SEQ ID NO: 2293 - DNA, 2053 bp, Homo sapiens
gattgctctgggagctttgcttagacacttgaaactacaggagaaagaaggatctagcgaaatatggctacagagagccctgctacgcgtcgggtccaggttactgaagctaaaggagatgtttaactccaagtttggatctattcccaagttttatgttcgagcaccaggaagagtcaacataataggagagcatatagattattgtggatattctgttcttcctatggctgtagaacaagatgtgctaatagctgtagaacctgtgaaaacgtacgctctccaactggccaatacaaatcccttgtatccgaagtaaaaagggtcagttggaggtagtttagtcactaaggccactgcaacttcctctcttaactcttagcagctggagatgttttgctgtagacacacagtttgaacataaaagggacttcagtactagtgctaataacatccagattgataaaaccaagcctttgtggcacaactatttcttatgtggacttaaaggaattcaggaacactttggtcttagtaacctgactggaatgaactgcctggtagatggaaatatcccaccaagttctggcctctccagctccagtgctttggtctgttgtgctggcttggtgacgctcacagtgctgggaaggaatctatccaaggtggaacttgcagaaatctgtgccaagagtgagcgttacattggcactgaaggaggaggcatggaccagtctatatcatttcttgcagaagaaggaactgccaagttgatagaatttagtcctctgagggcaaccgatgtaaaactcccaagtggagcagtgtttgtgattgccaacagttgtgtggagatgaataaggcagcaacttcccatttcaatatcagggtgatggagtgtcggctggctgcgaagctcctggctaaatacaaaagcttgcaatgggacaaagtactgaggctggaggaggtgcaggctaaactagggattagtctagaagaaatgctgttggtcacagaagatgcccttcatcctgaaccctataaccctgaggagatctgcaggtgtctgggaattagcctggaggaactccgaacccaaatcctgagtccaaacactcaagatgacggagtcgtgctctatcgcccaggctggagtgcaacggcgtgatctcagctcactgcaacctctgcctcccaggttcaagcaattctcccacttcagtctctcaaatagctgggattacatgcacccaccatcatcatgcccagtgctcatcttcaaactctatcagcgggcaaagcatgtgtacagcgaggctgcgcgagtgctccagtttaagaagatatgtgaagaagcacctgaaaacatggtccagctgctgggagagttgatgaaccagagccacatgagctgccgggacatgtatgagtgcagctgccccgagctggatcagctggtggacatctgtcggaagtttggggctcaagggtcacgacttactggagcaggatggggaggctgcacagtatcaatggtacctgcggacaagctgcccagctttctagcaaatgtgcacaaagcttattaccagaggagtgatggaagcttagcaccggagaagcaaagtttgtttgctaccaaacctggaggtggggctttggttttgcttgaggcctgaaaaaatgtaaaaagtctgagagaaactacttagggcacttaggaattggcaggactttctgtgccacagtaaattaatcttccttctgttttgtattatgatgaacggttgctattatatcaagatatattttcaaagaaatggttgaaagctctctatgcttcataatgattctttttccatcttaaaatatggttttactattaagagccaagatcatgcttggacagatcttttaagaataacttactgagatttattgatttgaagattttaaagatgaatggtaaaacacactcttaatactgattacatggattggacttgaattaaatatattgttacaattaaactgataccactgaattgt

SEQ ID NO: 2294 - DNA, 2660 bp, Homo sapiens
tttgaaaaaaagttgatgattttgtttcaaatacgtcagtgtcgcgggaagcctttaatcagggtatgataatagctccctgtgtgtttccagccaagtccatctacctcaagcttgagttctactcactcggcttcacctaatgtgacaagttctgctccatcgagtgccagaggtcagtgccagagtgtggggaagactgagggtgcccagagaaccttctagtcctgggaactgtggccagctgccacacgttcaggctctcgcctccaaacaggtgcagcaccactaccatgctgatgatcctctctctccttctcttcccagcttctcctttgttgtctgacaaacacaaacattcccgagaaaactcttgcctgtcaccaagagagagaccatgcagtgccatctatccaacacctgtggagccttcgcagaggatgctgtttaatcatattggagacggggccttgccacgcagtgacccaaatctctctgcacctgaaaaagctgtgaaccccacccctagcagctggagcctggacagtgggaaggaagccaagaacatgtcggatagtgggaaacttatctctccccctgtccctccaagacccacacagactgcttcaccagcaagacacacgacatcagtatccccctcgcctgccgggcgatctccattgaagggctctgtgcagtctttcaccccctctccagtggagtaccactcgccaggactcatctccaactcccctgtcttgtcgggcagctacagcagtgggatttcttctctcagccggtgcagcacgtcggaaacctcaggctttgaaaatcaggtgaatgaacagtcggcccccctgccggtgccagtgccggtgcccgtgccgagctacggcggggaggagccagtgcgcaaggagagcaagactccgcccccgtacagcgtctacgagcggactctgcggcgccccgtcccgctacctcacagcctctccatccccgtcacgtcggagccgcccgcgctgccccccaagcctctggcagcgcgatccagccacctggagaatggggcccggaggactgaccccggcccgcggcccaggcccctgccccgcaaggtctctcagttataagtcacttttctatgtacctgcgatgcattctttgcccgtttacaaaataagaagtatgatgagaagacatttagtgtaggcactttaataacttactcagctccttcgatgaatggaattaaaacttgcttattaaatatcatgttgcacaatattaaaagttgctgatctaaaacgccagatgttaaatgaagtatggctgaatttcattaaaacgtttctcatttggaagtggtaaatagtgataaagactccttttgtacctttttatgttcacttttttttatatagtttaatcttaaaaccaatacgatattgtcaaacgatacaatgtgtgacaatgttgtatcgtttttactgaatacttgatacttggagaaagcttattaagtcagtgcacatcctaacacagtggtccttattttagaagacttctgtaaataaggcaaggtttatcagtgcagatcatcagaattaaagttcaagcaggcgagcaagacagtatacttaaggggttgcaaagcttgggactggaaattgttttgttcttgaaacaaaatacttctttaaggttgcttttgctgtttgactgctgtctacattcgtaaaattctattttgtgaattggtagctaaatcccttactaccctgacaccgtggtatctactgtatttcttttcaaggtgcaatttgcttcagagttccaatcagctaggttaagcaagaggctccagaagaaatgtttacttgaattttgcgcttcctttcttgatagtttcctatataaaatttgtcattgaacaagagcaaatgctgaagtattaatgaggcacaaatgactgtgccccattagcaagaattcaggaatcaatacagacagtattaaattaatagcttaagtgaagaaaaaaaaaacttagtgaaaatgtattagcacgattaaatggcaaaaggacttataaaaggcaagggcattaactttcagtcctgcacaaaataaaaaattcctcacgactctccacttttaccagtggagtttgtcttagctgacctgtcgtctttctcttgaaggaggattgctgtagacttctctagcttgaatattgcaacatagcatcttaggtctagatagggatgctaatgccagttgtagaagtgtgaaaaaagcaccttgtatgtagtaatgtattttatatctttgttttttcttttactgactgtttataacactcaattgacaatagatatgaactgtattttaaatcatactgttaaatattttccctcttttgttgggaagctcattttagtttaaccatgtttgttttgttggtagcttacctggaaggcagtgaccacttttttatattctcttaatgaaaccattcagcaggtatatgctgttgaggctggttatagaggttttctataataaatgttcaagtatttttgtatataactggttaattttaataagagataccattatgtgtaaaaaaaagtaaaaataaacgcaaacagttgttg

SEQ ID NO: 2295 - DNA, 2006 bp, Homo sapiens
attggctcagggcaccccggaagagctgacctttgaggtggctggactcaatgcaaccttctcccacgagcaagtgagctttggagagccatttgggatttgcctcctggctgttctggttgaaggcacctttctggtcaccatgctggtgaggaatgccttctccaacctgagtttggaaatcgggaacatcactatcacagccccttccggtctccaagaaccatctgggatgaatgctgaaggaaagagtaaagataaaggcgatatggaggtgtacatccaacctggtccatatgtggatcctttcacgacagtgaccctgggctggccagacaatgacaaggagttacgcttccaatggtcatgtgggtcttgctgggctctgtggagcagctgtgttgagaggcagctgcttcgcacagaccagagggagctggtggttccagcatcctgcctgccgccgcctgactctgctgtcaccctgcgcctggctgttctgagaggccaagagctggagaacagggcagagcagtgcctctacgtgtctgcgccctgggaactcaggcctcgagtcagctgtgagaggaactgcaggccagttaatgccagcaaagacattctgctcagggtcaccatgggggaggactctccagtggctatgttcagctggtatttggacaacaccccaacagagcaggctgagcccctcccggatgcctgcagactcagaggattttggccaaggtccttaaccctcctccagagcaacacctccacgttgctgttgaacagctcgtttctgcagtcccggggagaggtcatccgaatcagagccacagcactgaccaggcatgcctatggggaggacacctatgtgatcagcactgtgcctccccgtgaggtgcctgcctgcactattgccccaggggagggcaccgttctgacgagctttgccatcttctgcaacgcctccacagccctgggacccctggagttctgcttctgtctggaatcaggttcctgcctacactgtggccctgaacctgccctcccatcagtgtatctgccacttggagaggagaacaatgactttgtgctgacagtagttatttctgccaccaatcgtgcaggggacacgcagcagacccaggccatggctaaggtggcactcggagacacatgtgttgaggatgtagcattccaggctgccgtgtcagagaaaatccccacagctctgcaaggcgagggtggccccgagcagctcctccagctggccaaggctgtgtcctccatgctgaaccaagagcatgaaagccagggctcaggacagtcactgagcatagacgtcagacagaaggtcagagagcatgtgctgggatcactgtctgcagtcaccaccggcttggaggacgtgcagagggtgcaggagctggccgaggtgctgagagaggtgacctgccggagtaaggaactcacaccctcggcccaggggtcctgcatgggcgattcatgggaaggtgcccctcctgctgcccatgtatctcacgctaggtgagagggcctgtttgcccagactctcactcctgcatctgctggtgagcaagttgagggagtaactgaatctcattaatatttgggtggccaaatgtgagtccagacactgctactgactgcccatgttctcaacttcagtacatgccagcctgacatctggctgccagctcctgggcttccttatccttctgggggtcttctctgaccctcagagcctactctacctgcccatatggctgtgaattcatgcagtgttcagtgactgatgaagctggcgtaaaaacaccccagctacctcacccctcttgatggataatcccaagcaggagtgaatcccaggtaatgggcttgatcacactcctgtactggcttccacccttccctgtctcacaccccctactccccacaaatgtttcttgggatcatgtccaaataaatgacttgctctc

SEQ ID NO: 2296 - DNA, 2394 bp, Homo sapiens
gttaggggagactgcctggaggagatgctcccggaggggctagcaaggaagggggctgagggaagtggagggagagatgggtcaggtgaggagccagggaaggggaaggtgatggggtgggctggaggcaagaagcttgaggcgcaggggaggagagagtccaggggtaaggcgagggcagccccgtggttcccaagtccagctgagccctcattatcctggggaaaagacttccacctagtgtcacccctcgccaaggcacacacacacacggagacgtgcagaggccagcatggtgtgcacccctcctgcccacaggtacacacatgtgtagatacacacacagatgctgggacacgcagaggggagcagacaagcacacctccacacacagatggcctcttctgggctgggtgtggctggccgtgggcagtcactacggcccaacccagtgactcacggggcagggctgaggggcacagtctccctgggtggcctgggaaacactgctcagctccaggatggagctgaatctccaagggcaaaggaatcttggcacccagctgggactcccctagggtccaatttgcttcaccagccttcccttcccccacgccccatcttgcagccctaagcccaggggcaatggctgaggtccttgccaaagggggtggattgggctggtggtgggttggagcacgatgctggcgtcccctttgcacatgttccctgggcacctctgtcctctgcgagtccctgcctgcccagagagctccctgctctggttaggcttgtgaggtccccgtagctgtggctgctgcagaggcctcagcctggccggaaagcctgttcacctgctggcactcagagcctcgcagtggtccttcccttttctgcatccggaatcttagggagaccctgatgaacactttgagttgtctccccagggacacacagctctctcctcatccaccacttagcacacaattctggccattccaaagacttcagatgaagaagtcctggtagacagtttatgaactgggattatgcaggacgtctccctcggatttgcagaaaggggtaccattgagagagggaggagaggggccgaggtcacagaggctgttaaaggcctccagccccagaaaagcagggattcagtctgcccaactgtagggccttgaatcccttccttctaagctccttccagccaaatgtgtgttctgccaacctgagctgccccagccccaaacaaactcagccatgccctccctgcctgcccttcaagacttgacccttcggctcttttctccacccctggcctctggaaagtccatgccccatcctcctgcagccctgcccttccctccccatctcgctcattcccccttctcttctttgaggtgtgcccggccggggcaggcgccctggagcctggcgccccaggcagctgctacctggatgcagggctgcggcggcgcctgcgggaggagtggggcgtgagctgctggaccctgctccaggcccccggagaggccgtgctggtgcctgcaggggctccccaccaggtgcagggcctggtgagcacagtcagcgtcactcagcacttcctctcccctgagacctctgccctctctgctcagctctgccaccagggacccagccttccccctgactgccacctgctttatgcccagatggactgggctgtgttccaagcagtgaaggtggccgtggggacattacaggaggccaaatagagggatgctaggtgtctgggatcggggtggggacaggtagaccaggtgctcagcccaggcacaacttcagcaggggatggcgctaggggacttggggatttctggtcaaccccacaagcaccactctgggcacaagcagggcactctgttcccctcccccttaagccaacaaccacagtgccaccaagctcacacctgtccttctcaggctggcatctcccccaccctgtgccccttttcatggtaccaggcccgcactgggggcaattgacttcctccaatccccactcctccgagacccaggagacaaacagcccttccttggggaaacttgggaatcattctggcttaaacaacacctcctcctgctgctcactcccgctgagcccactctactgccccagctccgtttctaccaccgcatcctcactgggctcactgcaggcatgctgaacaaggggcctccaaccttctgccctcctgccaaaagatctggggagtgtgaggagagggtggcatcaggagctgctcaggcttggcggagggagcggcatgggcgatgtcactcagccccttcccggtccgcccgcttccctccttcatgatttccattaaagtctgttgttttgtg

SEQ ID NO: 2297 - DNA, 2760 bp, Homo sapiens
tgtaccagatgctgaaggggctgagggtacgggccccgggggaggctgcagggaggcaggcagggcctcggggctgggcagaggagggccctgtggctctgagagggtgcgctgaagcctgccaaatcctctgccccccgcagtatatccacgctgccggcatcatccacagagtgagtcccggtggagaagccgctcatcagccctcccccagtgcaatccccccgcctccacgtcccacctgtgaggatgtgatggggtctgggggctgagccacgccctatgcacagcccctggtgggaacctgcctgggtgcccaggtaccttggtctgcccttgaagggctgcagagagcaagggggccaggtccggtggccccatctttaggtgccacccaggctcttggctgtgcccatgcttgggagggtggggcacagtggccacctttcctctgcccccaggacctgaagcccggcaacctggctgtgaacgaagactgtgagctgaagatcctggacttcggcctggccaggcaggcagacagtgagatgactgggtacgtggtgacccggtggtaccgggctcccgaggtcatcttgaattggatgcgctacacgcagacgggtgagaagctgcccagagatctgggcctctcaggctgcaccatctgcttctccacttcttcacggacagccctgtggtggctgctcccagggaggctgttgagctggggtgggagccgggcaggtgggctgtgttggtgtctcctccctccccgtctcatcctgtccccctgcccacggagctgaccagggcttctatctcagtggacatctggtccgtgggctgcatcatggcggagatgatcacaggcaagacgctgttcaagggcagcgaccgtatcctccagccgcagggcggcaccaggggcgggtggggatggctcctgcccaggtgggggcagtgggggccctgatctctggcccccgagctgtgttcctgacctcggtgcagacctggaccagctgaaggagatcatgaaggtgacggggacgcctccggctgagtttgtgcagcggctgcagagcgatgaggccaagaactacatgaagggcctccccgaattggagaagaaggattttgcctctatcctgaccaatgcaagccctctggctgtgaacctcctggagaagatgctggtgctggacgcggagcagcgggtgacggcaggcgaggcgctggcccatccctacttcgagtccctgcacgacacggaagatgagccccaggtccagaagtatgatgactcctttgacgacgttgaccgcacactggatgaatggaagcgtgagtggggggctcctggcacggcctgtgtggacccaagtggggggctctgggcagggcctgtgtggacccgtgagttgggggctctgggcagggcctgtgtgaacccgtgagttgggggctccgggtagggcctgtgtggaccccgtgggccctgtgcaggtggccaggctcagagtcctagatccccatccctgggatgcaggtcaggtgaggaggatgggaggtcagggcagcatggggccgtgtggcctggtggagatgacctctggctggagctggaagatgaagggaagggtgttcctggcaggctcagcacagaggctggcacagaaggagccgggagtggtgaaaggcagctgtgagtcagggaaccagggcccacttagcccctcctggcccccagacctgctgcccttccgccatgtccaggccagagacctgggccaccctgacaccctcaccacgtccgcttgtccctaaggcctctctgctcacacctcctgaatctgtccttgcctctccttgccccatttttgttttttgagacggagtctcactctgatgcccaggctggagggcagtggcacgatcttgactcactgcaagctccgtctcccgggtacacaccgttctcctgcctcagcctcccgagtagctgggactacaggcgcccgccaccaggcctggctaattttttgtatttttagtagagacagggtttcaccgtgttagccaggatggtcttgatctcctgacctcgtgatccacctgccttggcctcccaaagtgctgggattacaggcgtgagccaccgcgcccagccctctccttgccccactttaggatccctcccccctggacaactgtatacccaagacagtccccagggcctcgcctgtctcccccagcccccgctaagcagtccagactccaaccccaactgctggggtccatcatcccctataccaggggctatcccctcaacttggagggctggccaaagcctgtgcagcctcaggctggactcagagaagcctccccagctcccgcagctatgctgtggcctgaggctgtgctggacctggcttcatttctgctccaggatggcaggctgtgtcttcttcatggctgcatgaccagcctggggtgggtgtgcccggggaaagtaggtgtacactgggagccgtgccatgtttcaggccctgtcctggctctgcctcgggtgcgggaccttggtcctccacactggctgggtggggctggatgggttgagattcacatgtgctccttacgaccacgggtccctgggtgcccgcagcagggcctccacccttcgctgtgtgcatattcgtgtgcttatgagtttggctttgtttgattaaaggtttctgctgctagaaagataacttg

SEQ ID NO: 2298 - DNA, 1968 bp, Homo sapiens
catgccttcagcacacaaaaacttcagaacaaccaaaccacagcctccagctactcctttaaatcctcctcatggaccttgattcaagtgccgcaaaactggccactagaccaagaaatgcccacagcccaggattcttcctaagccgtgtcccacctgtgcgggaccccactggaaatcggactgtccaactaatatcacagccacttctagggcccctggagctctggatcaaagctctctggctgactgcttctcagatctcggctttgcggctgaagactgatgctgcccgatcacctgggaaagccccctggaccatcatggacgccgagcttcgggtaacttttacagtggaggattcatttggattcaaggttggctctcaacagtgccagctgcactgtcatcctaaagtacttctgtggaagagaacatggtggtgtcactgttgtaccagtgatgacacaaaatcccagatctacctgacgggcctgcgagggttgaagattgtgaagcaatagcctaagggactggctggcttcgagcagggcatcggaaccaggcctcctggcactggcctgggtagagccagggcgagcaccggctgacccccagtggaaccctgtgacagtcctgccagggcccaggccatcccaaccgacttccatctcatggaccctccagcggagaagccgggagaggctggcggactgcagatcacaccccagctgctgaagtcacgcacaggcgagttctccctggagtccatcctgctactgaagctgcgtggcttgggactggctgacctgggctgcctgggagagtgcctgggcctggagtggctggacctatcaggcaacgcgctcacccacctgggcccgctggcctccttgcgccagctagccgtgctcaatgtctccaacaatcggctgacgggcctggagccactggccacctgtgagaacttgcagagtctcaatgccgcaggcaacctactggccaccccgggccagctgcagtgtctggctgggctaccgtgcctggagtacctgcggctccgagaccctttggcccggctcagcaacccgctctgtgccagcccctcctactgggctgcagtccgggagctgctgcctggcctgaaagtcatcgacggtgagcgtgtgattgggcgtggtagtgagttctaccagctgtgccgagacctggacagctccttgcgtcccagctccagtccaggccccagagccaccgaggcccagccctgggtggagccaggctactgggagtcctggcccagccggagcagctccatcctggaggaggcctgccggcagttccaggacacactgcaggagtgctgggacctggaccgccaggccagcgacagcctggcccaggcggagcaggtactcagctctgcgggccccacctcttccttcgtcttctgaacgtggcctatggcccaggacagcctggcaggtggcctcgctgcccccagttcccctctctgcccccacactcgtcttagttgcttcacactggtcactggccctgcacactgggctattgctttatccctatcctgagagcagcccctccccaccatccctccacatgctgcaaggacagactgaagggctgtgagcaggtgtaagggctcccacatccgtgagcctgtgtccgcagctgctgccactctgggctgctccagcctgcaacttagtggaaggaattacttcctcctgaggctacaggcgagaaaggtagggatgggccagcctcccgtctcagctgttgggagacagtaggcaggctgagtggcccagagcactcctggaagtgggactcccctgccttgcaaatgtgcctctccagactgctcctgcacttaccccctccctgcagcaccttctctgcccgttcttgtccacacatctattaaatgcttctgttttcatttgc

SEQ ID NO: 2299 - DNA, 1655 bp, Homo sapiens
cactcactcctgctcagctgccgactgctacaaccggcgaggtgaggctcttctcccccaacagcctggacagtctttgtccccttctgtgcctttaagtccccaaatctccactcagtccactttgtctcccacagcagcagccactgcttccacatggcctccatgaccccccagtctccgtggtcttgcccaggaggctctgaggtttcaccccagtggcccgtgcctgagggtccccatggcctctgcccccatggtctctgggtttggggcccctgttttgtcccctgtaatctcaggtgacccccatgtccccaggtctcctgtatcttcaacacccctgaatgtccagttgtgctggtccccgtatctggtggtctcagctcctccctagagccccgcgtggcctaagtcccctcctccccagactctcatgggacctccagccccatgtctgcagcacctctccctccctagagccccacgtgcctgggacatcctgtgctcaccccaagagccggaagcagaaccacctgcccaaagtgctccaccccagcaaccctcacattagcagtggctccactgtggccacctgcttgagccagggtggcctcctggaagacctggacaacctcatcctggaggacctgaaggaggaggaggaggaagaggaggaggtggaggacgaggagggcgggcccagggagtgacccctgccaggtgcagatacaaaccagacacggtctgtggctactttgtgttattataagatatgagctcaaaccgagatatgaatgaccttggggagccatctgaggccaagatattgacgggggggattcctgggtcccattttcagcgcccagggtcacagatccacagtgggaagttctgtgggacacgttggcactgagccacaaagaaggtgtggccagaacaacttgggctcctgctgaccaatgtcctctagggcctaggggacagaggaacacagagtcacagcttcaggggccgaatgagcatggcggccttcctgagagaatatgccccaccacgaaactcagcccagtagacaccatcctggtagcggcttcggtagtggccgccgtggtgccacacaccgttgaggttggagtgggcacaggcatggtaccaccagcctccccgctggtacagggcacagttacctgaggggagagagagagtccatgtcctctcaccagaataaaagcctctacctgcacctcacagtgcaaggcttttgccaggcatcccctggcccctcccattcttattgaatacaagccctgatcttccatctcctcagcaaaaaaataggagccctggccccccaactttcttcagagtaatagccttaattccttccctatctccttaccaaagtacaagtcacatctttcccaccttttctgcaaactaggagtctaccgttcattcctttatcaaagaaaagtatctacttcctttctagaataagagtactagctctcaccctctgccctttacttgaacaggagtcttgattctttttttgcctcatcagagaaggaatctggactccccatccccccaccaggataaaagtcctgacctttgttctcttgacggaataaaagcttgcttatccttat

SEQ ID NO: 2300 - DNA, 2103 bp, Homo sapiens
tttgctgggatgggttttatcctgtcttacaaactacctgccacactggaagaacctcaacctggacttaaatgaaatggaaaactggaccatgggactctggcaaacctgtgtcatccaagaggaagtggggatgcaatgcaaggactttgactccttcctggctttgcctgctgaactcagggtctccaggatcttaatgtttctgtcaaatgggctgggatttctgggcctgctggtctctgggtttggcctggactgtttgagaattggagagagtctgagagatctcaagaggcgactgctgatcctgggagggattctgtcctgggcctcgggagtcacagccctggttcccgtctcttgggttgcccacaagacggttcaggagttctgggatgagaacgtcccagactttgtccccaggtgggagtttggggaggccctgtttctgggctggtttgctggactttctcttctgctaggagggtgtctgctccactgtgcagcctgctccagccacgctcccctagcttcgggccactacgcagtggcacaaacacaagatcatcatcaagaactggagacgagaaacaccaacctgaaacactaagccagaaaggacaagcgtctgctgttcaggagacgcttgctcaacactggatttggtaggatgtcccgctctagtcatctcactgtgcttttgatttttgaaaatgcatcttttcctgtggctattaaactatagtttctttccaagactggtaaaccatttttatcttctagtctgagaccagaatcaatcaagactgaatagtaatgacacccattactgtggatgagttttctcaattttaaaatagcgattgcacagaagtggtaaataaaacattaatctctatgtatctttgaaggtattattcatatggagcggaatcatttggcaaatcatttacttctttcaggtgtttaagataacctagtataataagcctgaggtcttgttgcatatttatttaaaatgcatgacgtcttattatataaaataattactagctctttagaagcttcagaggtgaaaggtgtagacacatcatctccttctgaatcagagacctcagtgtctctatggaacctttttcaaaaggcagccacattcagtcacgccttctatactgtcagaggcaggagggcgatcttgggttttggatgattcaagtagactctgccacacaaacgtgcttctgcatcctgtgttctgtatttcacgggcagcgtttctggcttcccaggcactgagcagcctgtggggggcacggcagggcaggactggggtgtgtgggtagataacctcctgggacggctgcctctctgtggagcacactgccagcccaggcgcagcgaccacagagcacatattctggagcccttcattttatttgctcaatgaaaatacttcgtccttttttatcagcaatacatatagttccaacaagaactattcatcacaaactgccagcctggggatttcttcatgaaatattttgtatttgcttggtacatggttcaaggaaactcttgtgtttgtgccaatcagggaaataaactgaacaataaacgacactgaaatagagtattaggcaatatgtagctttgtttttgcttttttttttaaagaaaaaccactgaatttttttccacccacaaacacatggaaagtgcagaaaccagttaatctatgtgatgtatttgcatacgtttacaaacaagacaaattaaaacagaaacatgttcagaatttaacctgattaaatattaagttcagtcctgagcttttgatatttaagacaatatagatgaagcaatagcaaaaaattttaatttatttgatttgcatgctacagagatttagctaaactttgttcatttggctagcaatattctttttgtacctgtaacacttaagattctgatatacaaaattgtaataatatactgataattcaaacttgagaactaaatattacattctttttaccctgtgcgaataaattctaccttttaaaaatagtatttataatattaaaattcatatttgtccat

SEQ ID NO: 2301 - DNA, 2349 bp, Homo sapiens
agttgggccgaacgaagcgtgcgcgctttggtaaccggctagaaatcccgcacgcgcgcctgcctcctctccccaggcctgagctgcccctcccactgcctttccttcttcccgcgagtcagaagcttcgcgagggcccagagaggcggtggggtgggcgaccctacgctagctccgggcgggagaaagcccaccctctcccgcgccccaggaaaccgccggcgttcggcgctgcgcagagccatggaattctcctggctggagacgcgctgggcgcggcccttttacctggcgttcgtgttctgcctggccctggggctgctgcaggccattaagctgtacctgcggaggcagcggctgctgcgggacctgcgccccttcccagcgccccccacccactggttccttgggcaccagaagtttattcaggatgataacatggagaagcttgaggaaattattgaaaaataccctcgtgccttccctttctggattgggccctttcaggcatttttctgtatctatgacccagactatgcaaagacacttctgagcagaacagatcccaagtcccagtacctgcagaaattctcacctccacttcttggaaaaggactagcggctctagacggacccaagtggttccagcatcgtcgcctactaactcctggattccattttaacatcctgaaagcatacattgaggtgatggctcattctgtgaaaatgatgctggataagtgggagaagatttgcagcactcaggacacaagcgtggaggtctatgagcacatcaactcgatgtctctggatataatcatgaaatgcgctttcagcaaggagaccaactgccagacaaacagcacccatgatccttatgcaaaagccatatttgaactcagcaaaatcatatttcaccgcttgtacagtttgttgtatcacagtgacataattttcaaactcagccctcagggctaccgcttccagaagttaagccgagtgttgaatcagtacacagatacaataatccaggaaagaaagaaatccctccaggctggggtaaagcaggataacactccgaagaggaagtaccaggattttctggatattgtcctttctgccaaggatgaaagtggtagcagcttctcagatattgatgtacactctgaagtgagcacattcctgttggcaggacatgacaccttggcagcaagcatctcctggatcctttactgcctggctctgaaccctgagcatcaagagagatgccgggaggaggtcaggggcatcctgggggatgggtcttctatcacttgggaccagctgggtgagatgtcgtacaccacaatgtgcatcaaggagacgtgccgattgattcctgcagtcccgtccatttccagagatctcagcaagccacttaccttcccagatggatgcacattgcctgcagggatcaccgtggttcttagtatttggggtcttcaccacaaccctgctgtctggaaaaacccaaaggtctttgaccccttgaggttctctcaggagaattctgatcagagacacccctatgcctacttaccattctcagctggatcaaggaactgcattgggcaggagtttgccatgattgagttaaaggtaaccattgccttgattctgctccacttcagagtgactccagaccccaccaggcctcttactttccccaaccattttatcctcaagcccaagaatgggatgtatttgcacctgaagaaactctctgaatgttagatctcagggtacaatgattaaacgtactttgtttttcgaagttaaatttacagctaatgatccaagcagatagaaagggatcaatgtatggtgggaggattggaggttggtgggataggggtctctgtgaagagatccaaaatcatttctaggtacacagtgtgtcagctagatctgtttctatataactttgggagattttcagatcttttctgttaaactttcactactattaatgctgtatacaccaatagactttcatatattttctgttgtttttaaaatagttttcagaattatgcaagtaataagtgcatgtatgctcactgtcaaaaattcccaacactagaaaatcatgtagaataaaaattttaaatctcacttcacttagccgacattccatgccctgaccaatcctactgcttttcctaaaaacagaataatttggtgtgcattctttcagactttttcctatacattttatatgtagaaatgtagcaatgtatttgtatagatgtgatcattcctatattgttattgatttttttcacttaataaaaattcaccttattcctt

SEQ ID NO: 2302 - DNA, 2848 bp, Homo sapiens
aaaaaagcgagtgggatatcccaatctttggactgcatcctggttgcctctactgtggtcacctttgggaagaaatgtcttctgtaaaaagaagtctgaagcaagaaatagttactcagtttcactgttcagctgctgaaggagatattgccaagttaacaggaatactcagtcattctccatctcttctcaatgaaacttctgaaaatggctggactgctttaatgtatgcggcaaggaatgggcacccagagatagtccaatttctgcttgagaaagggtgtgacagatcaattgtcaataaatcaaggcagactgcactggatattgctgtattttggggttataagcatatagctaatttactagctactgctaaaggtgggaagaagccttggttcctaacgaatgaagtggaagaatgtgaaaattattttagcaaaacactactggaccggaaaagtgaaaagaggaataattctgactggctgctagctaaagaaagccatccagccacagtttttattcttttctcagatttaaatcccttggttactctaggtggcaataaagaaagtttccaacagccagaagttaggctttgtcagctgaactacacagatataaaggattatttggcccagcctgagaagatcaccttgatttttcttggagtagaacttgaaataaaagacaaactacttaattatgctggtgaagtcccgagagaggaggaagatggattggttgcctggtttgctctaggtatagatcctattgctgctgaagaattcaagcaaagacatgaaaattgttactttcttcatcctcctatgccagcccttctgcaattgaaagaaaaagaagctggggttgtagctcaagcaagatctgttcttgcctggcacagtcgatacaagttttgcccaacctgtggaaatgcaactaaaattgaagaaggtggctataagagactatgtttaaaagaagactgtcctagtctcaatggcgtccataatacctcatacccaagagttgatccagtagtaatcatgcaagttattcatccagatgggaccaaatgccttttaggcaggcagaaaagatttcccccaggcatgtttacttgccttgctggatttattgagcctggagagacaatagaagatgctgttaggagagaagtagaagaggaaagtggagtcaaagttggccatgttcagtatgttgcttgtcaaccatggccaatgccttcctccttaatgattggttgcttagctctagcagtgtctacagaaattaaagttgacaagaatgaaatagaggatgcccgctggttcactagagaacaggtcctggatgttctgaccaaagggaagcagcaggcattctttgtgccaccaagccgagctattgcacatcaattaatcaaacactggattagaataaatcctaatctctaaatctaagaactaagctttgagtattatttaataatttctaataacactcattcctcaagtgatattagagattattcagtactcttgagagtgtcacaacacaaaatacgatgttgggttttcgaaatattttcaaagtgttctgtcttaatcacaaattcatatttttacacatttttacaatattgcctcagattatgttaaatttgggtcagtcttctctgaactttttctctctcggtttcttttcttccttcacagttttatctcacaaaaccatttttctaataagagacatcatgttggaaagatgttgtagaaatgtgcataaatttcagtgcctcttgtaagcattaaactgatgatgaagaaagttcctgatttgagaaatgaatcaaagtaattttaatgaatttttagcttgtattagcttgagttagctggcattgattttttagtccttttgttacctttaagttgtcaatatatggtttttgttcatctccccattgtagtcccacttgctctttcctgggggttccattgttctagcagtggaggtgttacagtgtcgccactcgtctaatttgaccagtgttaagaattttctaatttaataatttaatagtgatctcaataccacaccctcatggaaggagaaaagcatactattatatctgggacctctcttttagacctaaaattaattaacatatctacttatatgttacttatacctaaagctgttattaagacaaaccaagattctctgcttttgcactgaaattaaacttgaaaggaattctcctcaaaggtcggatattaaataagtcccaggcagatttacatatttaatttaaaacattggctttatttcattttgtgatgagtgatgtatctgtgttaacaaaaaattgtataatcattaccaatactatttattatgctcaaatatatcttggctttgaccttatttcaacacattctaagaagccttgacaaagtaagtatattttagagctgaatcagtaagattctagagaaagcaaaacatagtagttcacaattttgcaacatagaaagtcacattttgaaaggctattttgaaattgatttaatagctattatagtttatgaatatcaaaatttgtataatttgcatctttactaatgtatgctagagctacaagagaccttaaggataatatatgaaattagctttccttattttatagataaggaaaaagaaattgtgaaaggtgaatttacctaattagtgaaagttacataactaattacaacagtctgtactatataatgcagaggacgattctccctgtaaaaggaactagaagctattactaaaaatatatatagacaaaatt

SEQ ID NO: 2303 - DNA, 1977 bp, Homo sapiens
gttcctgcgctctccttcgcctgcgggccggcactgctcacctctcgtccagggacatgacgggcacgccaggcgccgttgccacccgggatggcgaggcccccgagcgctccccgccctgcagtccgagctacgacctcacgggcaaggtgatgcttctgggagacacaggcgtcggcaaaacatgtttcctgatccaattcaaagacggggccttcctgtccggaaccttcatagccaccgtcggcatagacttcaggaacaaggtggtgactgtggatggcgtgagagtgaagctgcagatctgggacaccgctgggcaggaacggttccgaagcgtcacccatgcttattacagagatgctcaggccttgcttctgctgtatgacatcaccaacaaatcttctttcgacaacatcagggcctggctcactgagattcatgagtatgcccagagggacgtggtgatcatgctgctaggcaacaaggcggatatgagcagcgaaagagtgatccgttccgaagacggagagaccttggccagggagtacggtgttcccttcctggagaccagcgccaagactggcatgaatgtggagttagcctttctggccatcgccaaggaactgaaataccgggccgggcatcaggcggatgagcccagcttccagatccgagactatgtagagtcccagaagaagcgctccagctgctgctccttcatgtgaatcccagggggcagagaggaggctctggaggcacacaggatgcagccttccccctcccaggcctggcttattccaagaggctgagccaatggggagaaagatggaggactcactgcacagccgcttcctagcagggagctatactccaactcctacttgagttcctgcggtctccccgcatccacagggagggtaaaacacttagcttttattttaatagtacataatttaataccaaaaaaggcgcctggatccccaaaaaaccgaggctgggagctagtggcccttttgctttctaggacttggggggccggccctccctcctaagcataacaaaggtggtgttgctccagctcagccccaggggacacagatgcactttgggggtgagggcaggtaatgactccatcgcaccctcagttcagctggacagaggctcaggtgaccccagccttcactgtctcccgctctccaggagcttatcttcgccccatctcccaaataagtgggcccttgtgctgtgaggaagaccaaagcctcagggaagataagagatatggagatgggagggggaggacaaggggcagagagtagggtctagctggctatctctggccttactaacacccccctggaggcatgccccttttctccagcacacaagcacattggggcacctggaaatattggttccaggctcctgttctctggacttcagatcctgggggagcccctcccccccctgaatccctggcttagctaccttcctgcctgtgcacctaaaaacctcaggtcagaactaggaaaagagttttgtttttatttttttgaaatggagtctcgttctgtcgcccaggctgaggtgcagtagtgcaatctccgctcactacaacctccactccctggggctcaagcgatcctcccacctcagccgccgaagtagctgggactataggtgtgtaccatcacacctggctaatttttgtattttttgtagacacagggtttcgccatgttgcccaggctggtcttgaattcctgagctcaagcaacctgccggcctcggcctcccaaagtactgggattacacgcagaaggcaccatgcccaggctagatgtgtcttatcccaatcctttggcaggcatgcagctccacaggcgatttcttcaagcagctgaagtgtttagccctcctgggttaagagccagataaggagaaatccctttcctaggtttggaatgtgttgtg

SEQ ID NO: 2304 - DNA, 1980 bp, Homo sapiens
caacagaaacatgatgctgatgttcagaagattttagaaagaaagaataatgaaatagaagaactgaaaactttatacaggagtaaacaacatgaaactgaagagactattagaaagcttgaaaagaaagttcagacactgatacgtgactgtcaagttatcagagagactaaagaagaccagattgcagagctgaaaaagatatgtgaacaaagtacggaatctctaaataatgactgggaaaaaaagcttcacaatgctgtagcagaaatggaacaggaaaagtttgatcttcaaaagcaacacactgaaaacattcaagaattgcttgaggatacaaatgtgcgtctgaataaaatggagagtgaatacatggcgcaaacacagtccacaaaccacatgatcaaagaactggaggcccgtgtccagcagctgactggagaagcagagaacagtaatttacagaggcagaaattaattcaagaaaaagcagaacttgaaagatgttaccagataacgtgtagtgaattacaagaagtaaaggcaaggcgtaacacactgcataaagagaaggaccatcttgtaaatgattatgagcaaaacatgaaactgttacaaaccaaatatgatgctgatataaaccttctaaaacaagaacatgctctttcagcttctaaggcatctagtatgattgaagaattagagcagaatgtctgtcaattaaaacagcagttacaggaatcagaacttcaaagaaagcaacaactaagggatcaagaaaataagtttcagatggagaaaagtcatctaaaacacatctatgaaaaaaaggctcatgacttgcagagtgaacttgataaaggaaaagaagatactcaaaagaaaattcataaatttgaggaagctttgaaggaaaaagaggagcagctaactcgtgtgactgaagttcagaggttgcaggcccagcaggcagatgccgctctggaagagtttaagcggcaggtggaactgaactcagagaaagtctatgctgaaatgaaagagcagatggaaaaagtggaggcagatctaactagatccaaatctcttcgtgagaaacaatcaaaggagtttttatggcgactggaggacatcagacagcggtatgaacaacagatagtagagctgaagctggagcatgaacaggagaagacgcacctattacagcagcataacgcagagaaggatagcctagtccgagaccatgaacgggaaattgaaaacctggaaaaacagcttcgcgctgccaatatggagcacgaaaatcaaattcaggagttcaagaaacgagatgcacaggttattgccgacatggaggcccaggttcacaagttgagagaagaattgatcaatgtgaactcacagcggaaacagcagctggtagagcttggtcttcttcgtgaagaggaaaagcaaagggctacaagggaacatgagattgtcgtcaataaactgaaggctgaatcagaaaagatgaaaatagagctgaaaaagactcatgctgctgagacagagatgacactggaaaaggttttacaagatgaattagaaaaccgttctaatcaggtgcgatgtgcagagaaaaaattacaacacaaagaattggagtcacaggaacagataacttacatacgacaagaatatgaaacaaaattgaaaggattgatgccagcatccctaagacaagaacttgaagacaccatttcctccctaaaatcacaggttaattttctgcaaaagagagcttccatccttcaggaagaactgactacatatcaaggcagaaggtaactgcacgagagaatgcaacggatgcaatttccaggctgtgctgtggacttcttccagcaggtttgaagatttggatattgtaaactgtgagatcagtggcattttttaaatccttaaatgtaattaagatcataaaaacatgcatcattc

SEQ ID NO: 2305 - DNA, 1994 bp, Homo sapiens
ctccttccttctgctgcgtggtgtggcctcttccacgtcctcagaatccagctgttactccgtccgcggcctctcagctctagggccctctgcacactggcccccccagatactctgacccatggatcccctgggcccggccaagccacagtggtcgtggcgctgctgtctgaccacgctgctgtttcagctgctgatggctgtgtgtttcttctcctatctgcgtgtgtctcaagacgatcccactgtgtaccctaatgggtcccgcttcccagacagcacagggacccccgcccactccatccccctgatcctgctgtggacgtggccttttaacaaacccatagctctgccccgctgctcagagatcgtgcaccaccgagaggtcatgtacaaccccagtgcccagctcccacgctccccgaggcggcgggggcagcgatggatctggttcagcatggagtccccaagccactgctggcagctgaaagccatggacggatacttcaatctcaccatgtcctaccgcagcgactccgacatcttcacgccctacggctggctggagccgtggtccggccagcctgcccacccaccgctcaacctctcggccaagaccgagctggtggcctgggcagtgtccaactgggggccaaactccgccagggtgcgctactaccagagcctgcaggcccatctcaaggtggacgtgtacggacgctcccacaagcccctgccccagggaaccatgatggagacgctgtcccggtacaagttctatctggccttcgagaactccttgcaccccgactacatcaccgagaagctgtggaggaacgccctggaggcctgggccgtgcccgtggtgctgggccccagcagaagcaactacgagaggttcctgccacccgacgccttcatccacgtggacgacttccagagccccaaggacctggcccggtacctgcaggagctggacaaggaccacgcccgctacctgagctactttcgctggcgggagacgctgcgacctcgctccttcagctgggcactcgctttctgcaaggcctgctggaaactgcaggaggaatccaggtaccagacacgcggcatagcggcttggttcacctgagaggctggtgtggggcctgggctgccaggaacctcattttcctggggcctcacctgagtgggggcctcatctacctaaggactcgtttgcctgaagcttcacctgcctgaggactcacctgcctgggacggtcacctgttgcagcttcacctgcctggggattcacctacctgggtcctcactttcctggggcctcacctgctggagtcttcggtggccaggtatgtcccttacctgggatttcacatgctggcttccaggagcgtcccctgcggaagcctggcctgctggggatgtctcctggggactttgcctactggggacctcggctgttggggactttacctgctgggacctgctcccagagaccttccacactgaatctcacctgctaggagccccacctgctggggacctcaccctggagggcactgggccctgggaactggcacccatggggccccacccatgagtgatggttctggctgatttgtttgtgatgttgttagccgcctgtgaggggtgcagagagataatcaccgcaccgtttccagatgtaatactgcaaagaaaaccgatgatgaggccgggtgcggtggctcacacctgtaatcccagcactttgggaggccgaggcaggcggatcacaaggtcaggagatcgagaccatcctggccaatatggtgaaacccgtctctactaaaaatacaaaaatttgctgggcgtggtggtgcatgcctgtaatcccagctacttgggaagctgaggcaggagaatcgcttgaaccagagagtcggaggttgcagtaagccgagatcgcgccactgcactccagcctggcgacagagcgagactctgtctc

SEQ ID NO: 2306 - DNA, 2062 bp, Homo sapiens
tatttagaactgggaggtctgggggaacgtgtgctaggcttctgcttcttgaatctgcctagcagcttctccaagggattcccatttaatacagatgaaataaatttccccatggacaacctttgttttgtgggcctcatatccatgattgaccctccccgagctgcagtgcctgatgctgtgagcaagtgtcgcagtgcaggaattaaggtgatcatggtaacaggagatcatcccattacagctaaggccattgccaagggtgtgggcatcatctcagaaggcactgagacggcagaggaagtcgctgcccggcttaagatccctatcagcaaggtcgatgccagtgctgccaaagccattgtggtgcatggtgcagaactgaaggacatacagtccaagcagcttgatcagatcctccagaaccaccctgagatcgtgtttgctcggacctcccctcagcagaagctcatcattgtcgagggatgtcagaggctgggagccgttgtggccgtgacaggtgacggggtgaacgactcccctgcgctgaagaaggctgacattggcattgccatgggcatctctggctctgacgtctctaagcaggcagccgacatgatcctgctggatgacaactttgcctccatcgtcacgggggtggaggagggccgcctgatctttgacaacctgaagaaatccatcatgtacaccctgaccagcaacatccccgagatcacgcccttcctgatgttcatcatcctcggtatacccctgcctctgggaaccataaccatcctctgcattgatctcggcactgacatggtccctgccatctccttggcttatgagtcagctgaaagcgacatcatgaagaggcttccaaggaacccaaagacggataatctggtgaaccaccgtctcattggcatggcctatggacagattgggatgatccaggctctggctggattctttacctactttgtaatcctggctgagaatggttttaggcctgttgatctgctgggcatccgcctccactgggaagataaatacttgaatgacctggaggacagctacggacagcagtggacctatgagcaacgaaaagttgtggagttcacatgccaaacggccttttttgtcaccatcgtggttgtgcagtgggcggatctcatcatctccaagactcgccgcaactcacttttccagcagggcatgagaaacaaagtcttaatatttgggatcctggaggagacactcttggctgcatttctgtcctacactccaggcatggacgtggccctgcgaatgtacccactcaaatggagttttgcacttactgcccaggctggagtgaaatggcgcattctcggcttactgcaacctctgcctcccaggttcaagtgattctcctgcttcagccttccaagcagctgggattacaggcacccgccaccatgccgggctaattttttgtatttttagtagagacgtggtttcaccatgttggccaggatggtctcgaactcctgacctcaggtgatccacctgcctgtgcctcccaaagtgctgggattacaggcgtgagccaccacatccggccttcttccaacacatttctatgcatgtctctactctgctcacctttccatcccttgtaatgttttacacgatgttttatacaatgtaggcactcaattaatgtttaataggagacgttggcactggccttagacactcacaatccaaggtggaaatctcaactctactatgtattattctgtggccttggacaagtatggaaccattctgagcctcagctacacctgcaaagtctcaataatacactccagggatagaccttgcagagtgttgtgagatttacacgtagaaatgggcataaagcaccaagcatgcttaggtcatggtagatgccttgttactagtagctttattcttgctgttattaatgccattatagacataataacaaatgtggttggtattatctgtgctttcaaacactctgtgtacacattaaccataaaacttagcacct

SEQ ID NO: 2307 - DNA, 2250 bp, Homo sapiens
aaggattatttccacattcctctctctgaagacaaacaaggcaggcggtatctggagttaatgtatgctggagctgctctaaaggacagttggagtcttgctgatgttggaatatctttctgttcaactctcaaatgctttgttaaggaagaagacaagcctactctatacgtgttcaatgctgtaactcaagacacaatgccagtaatggagagcatttcccttcttgataaaacagtgtctgatctgagaacacttgtaactctgagatgtggcctccccgtgagtgtctactgtctccgaaccccaaggggcctggagatgtatgattgcaacaccctcaaggactaccagactgatattggtactgcccagtatatttgatatcagctaccatttggcactagggtcctttgataccagattttgcagcttttcaagagaaaatagaaatctagattttcatatacaatctgttaactttatttacatattcactttaaaacagttaacacatttacatagtttaaatatcagaagtgaaaaggatgtgtagtggtaagttgctctccctctcctggccttacaagcacttagttccctcctcacaggcaaccattattgttttgaagatttacaatcaaaaccatttccaaattaaatctgaacaaatggaggcattatttctaaatggaaacctctgtaagttcagtatggatatgaattatcaacatttcattcttgggtctgggtctacagactaagaaataaggagggtctcatagccctgtcaagtcttgttctcaaagcagattcattaatatcctcagggtggaagagcaaaactcaggccacttcatctcttctctttcaaaatgtacttcaagcatgtataaatgcaagttcaagtacatattctttttcccgtttttaatgcaaggtagcatatgatacatgctattctgaaccctgctttgggcaatttcatcttaaaatgttgctgattatattaaaataatctttttaacaatgtgacgccaatgctatactggctgaaaatctgcattagtggaatagtgtttatctgttatagaaattacaacctctctctaaatactataccttggctgggcatagtgactagtgattcatacctctaatgctagcacttttggaggccaagagaggggggatcacttgagctcggtagttcaagaccagcctaggcaacatagtgagatgctcatctgtacaaaaaacaaaaaacaaaaacaatagcaggatgtggtggtgcccagctgcttgggaggctgaggtaggaggatcacttgggccaagaggttaaggctacagtgagctatgatcacaccactgcactccagcctgggtgacagcaagaccctgtctcgaaaaaaaaaaaaaaaaaatctgtacttccaggtcatgtctgcagtagccaaacatcaataagacaaacaaaaaaggctgtcagatttgttttaagcatactaaaaaatgatttgacgatacagagatgattaacatggcccctacctgacgatgacacacaagttcatgaaacatttcacactttttaaaaatggttagaaccttatagaaattacttgaagtaaatgaatccttgctgacaatcagcacaaccttaggtaacattgtgttgtaacattgcaatgaaatttgagttctcccaacatatacatagggctttgtaggtatccttagttaagtagttttgctttatataactgctaaatttgcatttattgatacttctcctgactgtagtatttgcttagcattattctttcctattattttaaattaaggctctcaaaactttgacataatttttttccttgtttttgatcaggggaagtgaagttctacaatttctcctcagagtactttgctatagtgcacatacctgctctgcacgcttgctggaggctgaaccctgcctagaacatgatgggggctcacataaggaagggcacacagtggcatttgtccccaactaactgataatttagttatttaatgaagtaccaaaggatgaaacaaaactaggaaaaactctggttgactattcttcaggcttatactgttcagattataatgtgacgttttaagctggaagataatttgaattgacccaaccccaacttttacagacttgaaaaaaagcaaattatcttaatgattaaatgacttgctcagcatgtgtcaagg

SEQ ID NO: 2308 - DNA, 3175 bp, Homo sapiens
cttcggcgcagggctccggccaacacagccctccaggccgcctactctccagccagccggctccacggacccacgaaagggcaagggggcggcgtcggggcggcgggacagttgtcggagggcgccctccaggcccaagccgccttctccggcccccgccatggcccggggcggcagtcagagctggagctccggggaatcagacgggcagccaaaggagcagacgcccgagaagcccagacacaagatggtgaaggagacccagtactatgacatcctgggcgtgaagcccagcgcgtccccggaggagatcaagaaggcctatcggaagctggcgctcaagtgccacccggacaagaacccggatgagggcgagaagtttaaactcatatcccaggcatatgaagtgctttcagatccaaagaaaagggatgtttatgaccaaggcggagagcaggcaattaaagaaggaggctcaggcagccccagcttctcttcacccatggacatctttgacatgttctttggtggtggtggacggatggctagagagagaagaggcaagaatgttgtacaccagttatctgtaactcttgaagatttatataatggagtcacgaagaaattggccctccagaaaaatgtaatttgtgagaaatgtgaaggtgttggtgggaagaagggatcggtggagaagtgcccgctgtgcaaggggcgggggatgcagatccacatccagcagatcgggccgggcatggtacagcagatccagaccgtgtgcatcgagtgcaagggccagggtgagcgcatcaaccccaaggaccgctgcgagagctgcagcggggccaaggtgatccgtgagaagaagattatcgaggtacatgttgaaaaaggtatgaaagatgggcaaaagatactatttcatggagaaggagatcaggagcctgagctggagcctggtgatgtcataattgtgcttgatcagaaggatcatagtgtctttcagagacgaggccatgacttgatcatgaaaatgaaaattcagctttctgaagctctttgtggcttcaagaagacgataaaaacattggacaatcgaattcttgttattacatccaaagcaggtgaggtgataaagcacggggacctgagatgcgtgcgcgatgaaggaatgcccatctacaaagcacccctggaaaaagggattctgatcatacagtttttagtaatctttcctgaaaaacactggctttctctggaaaagcttcctcagctggaagctttactccctcctcgacagaaagtgaggattacagatgacatggatcaggtggagctgaaggagttttgtcccaatgagcagaactggcgtcagcacagggaggcctacgaggaggacgaagacgggccccaggctggagtgcagtgccagacggcatgacgtggtgcggggcagcgtggccccaccggactagcacatgatgaatgtaaagttggcacaatgaaaatgacatcgctttaatggccttgtgtttgggatgtcctgtgtatgtgttcagcattcttaattgctgagtgtctttttggcttttcttttggttgtaacttaagttatagcttaatttatatttaaatgttttaagtataaatcacctctagtctgcatatggaatctgttcatttctattttcaggatatacttttgagatgtcagtgattgcaccaacactttgtgcttctagtggctttgccataattcagtgtcaccaataaggcacagcccagttagcagcttagcccccctagcaaaccccaaggcacaaagtgggcatcctgactcatctctaggtctgtggtttctcccctcttcccttggcagagttattgagggcatgatctcagggctgctaagataacatttctgaggattctagatgatcctcttaaagaataaaagcacatccgtggatcggacatggctgcatgtgcctgcttaacagggccaacttagttcctactgttctgtgcccttcagtggatggaacgtgagtgtctgatcatctctcttggaagttttctgaacctcccaagctctgtggtgaggacaaaccagtgtttgaatcatatgctgataactgtttgcctgtgaccctcacaccttgttcttcagggttttaatgattttctgttgacaacttttgcaatgctttcccaccaaagtgcttacttgtaaagaaaactaaatccttctgtgtccccggcagcctcagtgcagcaacagaagccaagggagaatgctgctggtttggcccatggcacagccagcttctctgaccagtaatccggggtgacttgagggtctgcaaaggcatagaactccccactgttttccacctcattctcccagattgagctcccttccaaaggatcgttcctctcattgcacagccatattacaaagggtttcctgctcaagtgatgttttggtaagaacttcgctgagttccactgtggattacagtttgtatggactactactgtaaattatagcttgtttggagggatattagtcattattttattcatgacaggtagactacaattcgaacttagggttacctcagtctttagccattactgcttatttcttttccccaagtcacaaaaaacttgtaagctgctgggttaaagcagaggccacctgtcagatctaccctacccttatttggttacatggcacctgagagtttcactcagaccagggatcttccttaggagggtcaaagtgcagatcagaccatgcaggtaaggtgaaccagctgcacggaccaggttcccgcaaaacattgccagctagtgaggcataatttgctcaaagtatagaaacagcccacctgtgcccactttgaccattggtgaggatagatataaaatcacttcttccaacgaagcctaggtgaaaatctatttataaatggaccacaactctggggtgtcgtttttgtgctgtgacttcctaattattgctaaagaactactgtttagttggtaatggtgtaaaattacattcagctccttcttgtcatataaaaggaatttggagggtgtcgcttaaaattttattccacctgtacatttgtcactttaaaattaaaattgagccggtatgagagat

SEQ ID NO: 2309 - DNA, 2535 bp, Homo sapiens
gaaattctcttggccagtcacagcgactcatgcctgtaaacccagcattttgtgaggtcaaggcgggaggattgcctgagcctgggagttcaggacaagcctgggcgacataggaagaccctgtctctacaaaaaatttaaaattagctgggcatggtggtgcaaacctgtagtcccagctacctgggaggctgaggtgggagaattgcttgagcccaggaggttgaggctgcagtgagctatgattatgccaccgcactcccgcctgagtgaccaagtgagctcctatctcagaaaacaaaaacaacaaaagaagaacattctctcactctctagttggattctttctatagtacacggctatctgtgctggcccctggctggaggggagggcagtggcagaggagatggagacaggaaacgggagaactgaatgggagagagagggaagggggaaatggagggggaagagaggaggggagaggagaagggaaatggaggtgaggggtggtggaaagaggggaggagggagaaagaatagaggaaaacaatgggccagaaatgggaacttgggttttttcctctcacaggccccagagcctccacacggggagcaaccagtcagctaaccccattcacatcccagagccctcagagtctggtctgggtctcatccgcgtcaccctgcaccactccttgtctacaagatccttggtctgaaatagcatgggaggctctggaagctgtggcattgccctagggtcaggctcattttgataggtacctaggaggggggcattccttcaggttggggccttcttgctcttctctaccccctcacatcaggccacaggccccactcatagctgcaagtaaaaaggaagaagaaaatacagaaaaaaattcttttttttttttggagacagggtcttgctctgtcgcccagactggagtgcaatggtgcggtcacagctcactgcctcctgggctcagctcaaaccctttcacctcagcccccggagtagctgggaccacaggcacacaccactatgcccagcttcttctactttattttattttatttttgtagagacagggttttgctatgctgcccgggctggtctcgaactcttgacctcaagtggtctacccatctcagcctctgaaagtgctgggatcacagacatgagccaccacgcccggcagaaaataaggaaaaaaaaaatctattaacaattacataaggctttaatgttagttagaatgcttttggcaggaaaaaatagaagacccaaatcaaaatgtcctaaacaataaggggactaaaaatcttgtaaaaacttcggaggcagagcaaggtttggtgtcaaggttggttaattcaggggctcaacactctatcggggcccatgctcttttcagctttctgtgttgccttgctattgagcggtagcttttgtcctcgtgtttgtcccattctggtcacaagacggctgcagcaacctcaagcaccaggcacaagcacaagcacaagcacaatgtgctcacgcagtaatgcccagggctgcaagaggaaaatcctttccctgagttcttttttaagagcaaggaaatttttgcaagaatatcttccttccaacccccaaccggcagacattacctcacctctcatttccataattacatcacatgctggttccttaaccaggccctggcgaaacaactggaattaccttgattggcttaggggaaggttcaccctggtagtgaagcccagcccctccaatgcacatgggtgtcccacaccaggacagagctgcgttgtgttggcaggtggaacaagctgggaatggctttgaagtagctatgcaacagtggctactgcctgtgacagcctcttctgtgacatgtggcatatgctgcctcgaattgggattatgcatgtgtggtctgtctctacaatctgagaagcaaaaagctaaatatatttcctatagtacccagcacagtgacttgcaccaaacaggtgttgcaaaaataatgaacgaataaaacttgaaagttgaaaatgaagcccagtgcggtgtgctgttgtctcagctacacaggaggctgaagtgggaggagtgtttgagcccaggagttcaaggccagcctgggcaacatagtaagactcagtctctaaaaaaataaacttagcaagtatcaggcttaatttaaaaaaaagaaagaaagaaagaaagaaagaagaacggccaggtgcggtggctcacgcctgtaatcccagcactttgggaggccaaggcaggcggatcacaaggtcaagagttcgagaccagcctggccaacatggtgaaccctcagctctactaagaatacaaaaattagccaggagtggtggcgggtacctgtaatcccagctactcaggaggctgaggcaggagaactgcttgaacccgagaggcggagcttgcagtgagctgagatggcaccactgcactccagcctgggtgacagagcaagactctgtattgg

SEQ ID NO: 2310 - DNA, 2634 bp, Homo sapiens
tatggaacttgttacccagagaaaggaagtgaaaagatttacaattataagcacgaaattcattggcagattacctgctttatctacagacagattgttttggggtttggttttgtctaggcagcctctggccaggctccttaattgcttgctctgctaatatttcagcttcctctcttgactccttgaggaaccaaccgctctttggaagacaaacacttagccacctctgtgctccagggtaaccctgagaagctctgctgtctggggcaagctttctttccaaagggaatgagaggaaggcaagcaggcagggtcctgcagcgtcaggccttctggggaaagtttcctcattttgtttgacagggtcctcagtacatcagacacccagatttgaatataagttcagagcctgatctcaagctaaatcagaatgctttggggactaaccatgatcgagaattggccaaatagtatggcatataaacagccatccagccagccgcaagtaaaggaacgtttgatccttggcaccttaaatgattgattgccttcaataggcaaactgctggtctggaaatctcgttgaaggctgaatacttcatgcggagtaggacaagccttagcccaccttcaggttgaaaggaaaggccataggactcaaaagataatgactctgaaactaaactccttccttctgaagctgacagaggtacttagtgcatctcaagactccatctcataaaactcatttgtgagggatttgctctagatttttctaaacattttttcatctattgtccagacttgcaaatccagtgtggacctgatggagataccctccacacctgcgctcccaccccctcggcagggagacgtctcagtagaggagaacacacccattatgctgggatttgtatttataaatcacttcccttttagggatgagcggtgtggggcgtgtgtgcgtgtgagtgtatgcgcgtgcgtgtgtgaccctcaagtgtactttgctcaatttagacgtgcagtatttccagaaacaatgaaaaaagtaagatgttttcttctttatgattctgctcaaaacaccacgtgccgcctcagagctttttctagagcctcggtcctcaatgacgcgcttgacctgttgatgcctcagcccagcgaagcccctcacctgtgccccgggcgacagctcttcagtgtgcagtgcaggcctggggtggactgccaggccttcgctctgtgccagcaacgccgttcttgttgctcctccatgaacaggggtacaagccctggcccctcctcgacactaagccccccacagactcagcctccaaggaaccgctgagcacccttgaagcatgtcattgtcagtgatacctttttattctatggaactctaacctattcgtgtcatattgaccttttgctgcatgagtcataaattatgaaatcagtcttacagtttttgaaatgtagccagcatttgtaaggctaaacctttttcatgaactgaatttaagtgaataaccaagccacagttcctcctcaaatggagagtgatgatcgacatttgaatctctttgccctttccaacggctatggcatcaggttctaaaataagctcgtaatttttcctgttattttaataatatggaaatattagcatagtgtttcttttgatagtgatagactataatccatatttaaattttatagagaagaaattttattgtactgtgatgtagatatttattatccaggtaaggatttgcccggtgtgtattttttacaattgagacattttactttaatctttaaaaaaaatgcattaaaaacacactcaaaaaaaaaaaaaaaaaaaaaaaaaccagactgggggaaaaaaggtttggccttatcacagaatttttactgtgctgtataaatgtttgcaaatgcgaaaagtgtgcatttatagtgtgtttccacattaattaatgccgccttcaagagcaatattgtgcaggtaaaacgctgtttgtggctttctgttgcacagttaaagctgacccaccctatgcacaagacaatcaaatataaatctgtcctcctcaggatgcagataatactcatgtaaattatggagcacaatgtaagacaaaaggagacactttacatatgtattgttgatacagaaattatcagggcatgaatgagctgatgtgacattatgccacttctttcttttggttctcccttattaacttggcgtttttaatttgaccatagagccaaattagttctccatgctttcttcgtagaaaatccttttttttcccataatgttttcatgccctgagaatcagaaaaatactacagaatagaaaaagatttacagtcattggaagatttgtgttttgcaaacagtgttaagtgatattgctagatggtgatattttttcagcctaaaactctgttgaaatctgtgatcaaaatgttttaaactatccaaaaaaaatttgtatatttgggaaaaatggatttttacatagcttttgtatgcagatataaaactgtaattatgaatatagtgggcgtagataaactcataagcttaaattctaaaaaagaaaaagcttataacag

SEQ ID NO: 2311 - DNA, 2832 bp, Homo sapiens
tgcctgtgtattacaaacagctgggaatgtctccaagccagagtggactactagtaggtattcgttacttcattgaattctgcagtgcccccttttggggtgtagttgcagaccgctttaaaaaaggcaaaattgtcctcctcttttctcttttgtgttgggttttattcaacctgggcattggatttgtcaaacctgctaccttgagatgtgtaccaaagattcgcccaacaactcaccccaccaatgcaagtcaccagttaactatcctgccaacaaattcttcctttacctctttcctcaccatatcaccaaaaatgcgtgagaaaagaaaccttttggaaacagggctcaatgtctcagacaccgttactttgccaacagctccaaacatgaacagtgaacccactctgcagccccagacaggtgaaattactaaccgtatgatggacttgactttgaactcgagcacagcaacccctgtctccccaggaagcgtaaccaaggagacaaccactgttattgttaccaccaccaaatcttaccttctgaccaagtcatgcttgtttatgatcaacaagaagttgaagctatattcttggtgatcttggtagttgtcataataggagaatttttcagtgcctcttctgtcacaatcgtagacacggtcacactccagtatctgggaaaacacagagatcgctatgggttgcagcgcatgtggggctccctgggctggggcctggcgatgctgtctgtgggcaccgggatcgactacacccacatcgaagtgctcatcgatggaaaggggtgtaagccccccgagtacaggaattaccagatcgtcttcatcgtcttcggcgttctcatgaccatggccttgatcgttgccactcagttccggttccgctacaaccatttcaaaaacgatgattctaaagggaaagaggtggagatcccgcaggtggaaaggaacaactctacagagtcctctgaggagacaccaaccaccacaagccactcgcaggccttcaacttttgggacttaatcaagctgctctgcagcgtgcagtatggctcagtgctgtttgtggcttggttcatgggttttggatatggcttcgtgttcacctttctctactggcatttggaagacctcaatggaactacaaccctctttggggtctgttcagtcctgagtcatgtgtctgagctgacagcatatttttttagtcacaagcttattgaattgatcggccacatcagggttctgtacattggcctggcctgcaatacggctcgctatatttatatttcctacctggagaatgcctggactgttctccccatggaagttcttcaaggagtgacacacgcggccatctgggcagcatgcatttcttacctcagtgcagccgttccccctgagctgaggacatctgctcagggcatcctgcagggccttcacctgggtttgggaagaggatgtggtgccatgatcggaggcgtgttagtcaattattttggggctgctgcaaccttccgaggaattggcatggcctgcttggtgatcctactgctctttgccctgatccagtggctggcagtgccagatgaggaagaagacaagacaatgttggcagaaagaattcctgttccctccagtcccgttcctatagcaaccatcgacttggtacagcaacagacagaagatgtcatgccacgcattgagcccagacttccacccaagaaaactaagcaccaggaagaacaggaagatgtgaacaaaccagcctggggagtcagctcttctccctgggtgacctttgtctatgcactctaccaaattaaagagatgatgcaactcacaagagacaaccgtgcttctgagatacagcctttacaggggaccaatgagaatagggaaaattctcctgctggtagagcccagcctgtcccatgtgagactcactctgacccatctagaaaccagccatcccctgacgcagcagcatctcagacgcagaccagccccgctcaccccagtgtggacccgtgcacagaggagagtgaagagcagcaggctcagctggccgcgggaggacactgagggcatcctgctcatctcacaccctgcatggaatcaggctcctcagccaggacacagggtgaggccccccagccaggatatgcctcccctggaggagcacagcactgcatatgcttctaaatatctaaactcattaacatggaaacacacacacaggagctacagtacatattggcaggaaaaggtaaactttcgtaatctcattggaattacaacagggaaatggagttcaatgaggactttcagttctttgcttggttaggttaaggatgatagaatttctctgccagtgcagtaagagttgaaaccggcagttacactaagtaagtggagggaatgaaagtgtttcgaggtgaatgtggatataatttccctcttctgattatttattcttatttggttcctaacacaaactgggaagagatagaattcatctatactttcttttttcttggagagaaccgtttaaaaaattacaagatatatttaaaaagtaaccagataaaagtagcacatgtgcttttgttaaaaataaagttaaaagttaaagttaaaaaatgaagttaaaagtttcatcagaaactttacatatctttagcaaatatatttttatatgtgtatggcatataatggaaataattctttgagcaacagaagctattattaactactgcaagctaagccgagcttaaaaatgccttttgttttaaatgggctttgag

SEQ ID NO: 2312 - DNA, 3328 bp, Homo sapiens
ctggatcacctgaggtcaggagttcgtgaggctccggcgtttgtatttcatttgaatctaaagtgagcagccacagggacccgcagctcatcagaccagcctggggttccaggccaggagggcagcggtttgctccagagccagctgcttgtgggtgtgggacggtggcgacgcgtgcaccggggatgtgtcctgccaccagaggaggtgtgcgtggcggggagcagaggggctttgtttcccaggtgaaggtgcggcttcttcactcttagaggtgcgtgtgtgggtgggggtgcttgctgttgaggtttatgcctgtgactgacagctgtcccccaagccatgctggcagtgtgtaggtgtcgtgccggccaccgcagaggaatcctctgggcttctgtggttcaagtggggcccagcgcagagctccatgagttgctgagcagccagccctgcagcatctcctggttttggcagcaggaggcgtcccctgtgcattcaggggccgtggggctggggcactcgcagcaggaaggagccctgctcaggcctgcgtgctccctttctgcagagggagacgctgttgcggcagctggagacgaaccagctggacatggacgccacgctggaggagctgtcggtgcagcaggagacggaggaccagaactacggcatgtatgtggccggacccgcccgtgcgggcggtgtgggggctgcgggcgtggccgtggtgcagggccatgggctgcaccaaggagacagcagaggggagtgtcccctgtttggggtaaattagtcacctttgggcacgggtggaggaggactcaggtttgcactgcccccagcagcccccccacagtcacccctggcgtggactcctcatacaggtcatgctgtgcctgccactctgagtaccgctgaccgtggccaggtgctggtgctcatggagtgctgctggggctgcctgcccatcaggggcttggcctcccagattgatgccagcatggggtgtgctttctggggagctgcttgactttgggaagctccctgtgttgaagaggcatacaggccaggacatggaggtctctggtcctcgacagcagagggaggctcagagcatcctcctgagtgggcctgggcagtgcatagccccggggttgcggccagtgggacagctggcccgttctctgcctcaggctcctgtacagctaggggcttggtgcctcccctgggacccaggcagggaccacggaatcagtggccctcctgaggccccccaggaggtctctgtttccagaaggagagccctgtgggtcaccttggatctggctgttggctcagacacagcaagagaccgagagggaaggcagtttgatgcctggagagggacccgtggcttccagctgccaggccagccccagaatggagccccccgcatgggcgcttctctgttgaaccaatcctggcatttcctgggcctgagagttgggtcagctggatgctgcgatggccgcacgtgctccaccaagccccagccccctcctcttcccagaaacccccgctcacgggaaggtccagttgctgccatctggccacctctgcatggagcccccaacagctgtgcctcagaacagatccgaagtgactttcaggggagctggacacatgtacgctggtgcctgctgtccccaccctttggcactgctgctctttctttttctgagatggagtctcgctctgtcgcccaggctggagcgcagtggtgtgatctcggctcaccgcaagctccgcctcccgggttcacgccattctcctgcctcagcctcccaagtagctggggctacaggcacccgccaccacacccggctaattttttttgtatttttagtagagacggggtttcactgcgttagccaggacggtctccacctcctgacctcgtgatctgcctgccttggcctcctacagtgctgggattacaggcatgagccaccgtgcctggctggcactgctgcccttggaagtggatggggatgatggcctctgtggggcgggtggcccagaacacagtggctcttcccagccccagcagcagcagcagagagccccctgtcacctgagggcctcagggagaggcaggggagccaggcttctcacccgccttctgcctttcagcttcctggagatgatggaggctcgcagccgtggccatgcgtccccactggcggccaacgggcagagcccatccccgggctcccagtcaccagtggtgcctgcaggcgctgtgtccacggggagctccagccccggcacaccccagcccgccccacagctgcccctcaatgctgccccaccatcctctgtgccccctgtaccaccctcagaggccctgcccccacctgcgtgcccctcagcccccgccccacggcgcagcatcatctctaggctgtttgggacgtcacctgccaccgaggcagcccctccacctccagagccagtcccggccgcacagggcccagcaacggtccagagtgtggaggactttgttcctgacgaccgcctggaccgcagcttcctggaagacacaacccccgccagggacgagaagaaggtgggggccaaggctgcccagcaggacagtgacagtgatggggaggccctgggcggcaacccgatggtggcagggttccaggacgatgtggacctcgaagaccagccacgtgggagtcccccgctgcctgcaggccccgtccccagtcaagacatcactctttcgagtgaggaggaagcagaagtggcagctcccacaaaaggccctgccccagctccccagcagtgctcagagccagagaccaagtggtcctccataccagcttcgaagccacggagggggacagctcccacgaggaccgcagcacccccctggccaggcggtgtctctgttcgcacaggtccggagaagcgcagcagcaccaggccccctgctgagatggagccggggaagggtgagcaggcctcctcgtcggagagtgaccccgagggacccattgctgcacaaatgctgtccttcgtcatggatgaccccgactttgagagcgagggatcagacacacagcgcagggcggatgactttcccgtgcgagatgacccctccgatgtgactgacgaggatgagggccctgccgaaccgcccccaccccccaagctccctctccccgccttcagactgaagaatgactcggacctcttcgggctggggctggaggaggccggacccaaggagagcagtgaggaaggtaaggagggcaaaaccccctctaaggagaag

SEQ ID NO: 2313 - DNA, 2067 bp, Homo sapiens
atgatgttctctcctttggactttatttggtgtttcattcttgaatttcctagcatttcactgtcaaaaacacttaaaaaaggccaggtgcagtggctcatgcctgtaatcccagcactttgggaggtcgaggagggcggatcactggaggtcaggagttcgagaccagcctggccgacatggcaaaaccctgtctctgccagaaatacaaaaattagccaggcgtggtggcgggtacctgtagtcccagctactcgggaggctgaggtaagagaatcacttgaaaccaggagatggaggttgcagtgagccaacatcatgccacagcactccagactgggcaacaagagcgagactctgtctcaaaaaacaaaacaaaacaaaacaaaaaaagtcttaaaagaatatactgaaaactgataaagttttcagctttatcaataccatgggaaagcatccatatgtgtttcctccgcttggaagattagaaatggtttggagaactgatacaaatggctattacttcatatattaattgcatgttgtttactttgaaggtgaaatacaaagtaccttttgttgctaggaaaggaaatgaatgagatacacagttccatacacagcataaagaagttgttctaagaacacttcctcaagcagttcattgggctgaatttcctcttttgaccttgttacttgtaagagtatgggcctaagccaaactgtttgggatcagatcccacctaagcctcttatcagatggataagcaagctatttaacctctgtgagcttcattttctcttctgtaaaaggcaatgacaaggtccctaccttcaggattgctgtaaggatgaaatgaattactagatgtaaagtgctcagaacactggtccctgcatatatttaatgttcaaaaaaaaaagtgagctactattattcagtgcttacagcctcctgggcaaatatttttaaaaaagcaaattaattaatttgcttaaaagcaaattaattaagctacatggcagtggagactgaagttttctttctagattaccagatgatttggggttaaaggatttaattttggtgtctcagctgctacattgttagtggtggcaaacatttaaaaatatctcattaacaaacgagggcttgttcctcagctgtcttttacaaatgaaaaactctcccgaaacctactttaaaactcctatgtgcactgtaaacaactaacctgggagcatgtggtggtggtggtggtgttgattaaaaaaatctactgatacaacaatgaatgtatctaatgccactgtgaaactgtacatttaaaaatggtaaagatggtaaattttatgctatgtgtatttcatcacaattaaaaaaataatggttagttaactgaaacaaaaacacaagctcaacacatttttaacaactctaataaatatctgccaaatgtccaaggtgaaaagctcactgcagagctccattttcactatttatatatttctttcccaaggagaatgagatagttttaatgcaggagtaactccatgtttacctgctccattttaaccatttaatacgaataataatatttcttagaatgggttataaatttgaagatttaatcatttacaacacgattttcaatgatttctattttttatattctttctccctttatacatcttaaaaaacatgtggcagtattcacaaacagctgccaaatactgatgaatatgaagcagtcatgtaaaagtgatgatatatgttcatgttatgttggtatgtgttgtttctattataaagtaatagtttcagaaaacatgtataaagggatccatttttgtaaaaggaccaccaaaagtaccataaaaccaaaatccaaaatacatgcataggaaaagatttgcaaggctataaagtactaaagacgttaaaagtggctatctttgtatgagggaataactggtaatttttctataaggaatatgtatttattgtgcaatccaaaatctcataaatgttacaaaatgaaaaattataataaaacaggtagctgt

SEQ ID NO: 2314 - DNA, 2492 bp, Homo sapiens
agccccgccgcgatgcccgcgcgcccaggacgcctcctcccgctgctggcccggccggcggccctgactgcgctgctgctgctgctgctgggccatggcggcggcggacgggccccccgcggcagacggcgaggacggacaggacccgcacagcaagcacctgtacacggccgacatgttcacgcacgggatccagagcgccgcgcacttcgtcatgttcttcgcgccctgagatgggatcttgctctgttacccagcctgaaaccagtggtacgcagccgcagctcactgtagcctctaactcctgggctcaagtgattctcctgcctcagcctctgaagtagctgtgactacaggcgcaggtgtggacactgccagcggctgcagccgacttggaatgacctgggagacaaatacaacagcatggaagatgccaaagtctatgtggctaaagtggactgcacggcccactccgacgtgtgctccgcccagggggtgcgaggataccccaccttaaagcttttcaagccaggccaagaagctgtgaagtaccagggtcctcgggacttccagacactggaaaactggatgctgcagacactgaacgaggagccagtgacaccagagccggaagtggaaccgcccagtgcccccgagctcaagcaagggctgtatgagctctcagcaagcaactttgagctgcacgttgcacaaggcgaccactttatcaagttcttcgctccgtggtgtggtcactgcaaagccctggctccaacctgggagcagctggctctgggccttgaacattccgaaactgtcaagattggcaaggttgattgtacacagcactatgaactctgctccggaaaccaggttcgtggctatcccactcttctctggttccgagatgggaaaaaggtggatcagtacaagggaaagcgggatttggagtcgcagctgagcccgaggctgacaagggcactgtgttggcactcactgaaaataacttcgatgacaccattgcagaaggaataaccttcatcaagttttatgctccatggtgtggtcattgtaagactctggctcctacttgggaggaactctctaaaaaggaattccctggtctggcgggggtcaagatcgccgaagtagactgcactgctgaacggaatatctgcagcaagtattcggtacgaggctaccccacgttattgcttttccgaggagggaagaaagtcagtgagcacagtggaggcagagaccttgactcgttacaccgctttgtcctgagccaagcgaaagacgaactttaggaacacagttggaggtcacctctcctgcccagctcccgcaccctgcgtttaggagttcagtcccacagaggccactgggttcccagtggtggctgttcagaaagcagaacatactaagcgtgaggtatcttctttgtgtgtgtgttttccaagccaacacactctacagattctttattaagttaagtttctctaagtaaatgtgtaactcatggtcactgtgtaaacattttcagtggcgatatatcccctttgaccttctcttgatgaaatttacatggtttcctttgagactaaaatagcgttgagggaaatgaaattgctggactatttgtggctcctgagttgagtgattttggtgaaagaaagcacatccaaagcatagtttacctgcccacgagttctggaaaggtggccttgtggcagtattgacgttcctctgatcttaaggtcacagttgactcaatactgtgttggtccgtagcatggagcagattgaaatgcaaaaacccacacctctggaagataccttcacggccgctgctggagcttctgttgctgtgaatacttctctcagtgtgagaggttagccgtgatgaaagcagcgttacttctgaccgtgcctgagtaagagaatgctgatgccataactttatgtgtcgatacttgtcaaatcagttactgttcaggggatccttctgtttctcacggggtgaaacatgtctttagttcctcatgttaacacgaagccagagcccacatgaactgttggatgtcttccttagaaagggtaggcatggaaaattccacgaggctcattctcagtatctcattaactcattgaaagattccagtacgcaaggggatgtggatacttggcccaaagtaactggtggtaggaatcttagaaacaagaccacttatactgtctgtctgaggcagaagataacagcagcatctcgaccagcctctgccttaaaggaaatctttattaatcacgtatggttcacagataattctttttttaaaaaaacccaacctcctagagaagcacaactgtcaagagtcttgtacacacaacttcagctttgcatcacgagtcttgtattccaagaaaatcaaagtggtacaatttgtttgtttacactatgatactttctaaataaactcttttttttt

SEQ ID NO: 2315 - DNA, 2128 bp, Homo sapiens
tgggggtgaagccaccgcgttctgcccacattcggggcgcggagctgggggtccccggggggcgcccgcagttaagatggcgtctacagcggacggggacatgggagagacgctggagcagatgcgggggctgtggccgggtgtcgaggatctgagccttaacaagttggcgacgtctctgggcgcgtcggaacaggcgctgcggctcatcttctccatcttcctgggctacccgttggctctgttttaccggcattaccttttctacaaggacagctacctcatccatctcttccacaccttcacgggcctctcaattgcttatttcaactttggccaccagttctaccactccttgctatgtgtcgtgcttcagttcctcatcctgcgactcatgggccgcaccgtcactgccgttattactaccctttgcttccagatggcctaccttcttgccggatattactacacagccaccggtgactacgatatcaagtggacaatgccacattgtgtcttgacactgaagctaattgggctgtgtattgactactacgatggaggcaaagacgggaattccttgacctctgagcaacagaaatatgccatacggggtgtcccttcattgctggaagttgctggcttctcctacttctatggagccttcttggtagggccccaattttcaatgaaccactacatgaagctggtgcggggacagctgactgacataccagggaagatgccaaacagcaccatacctgctctcaagcgcctgagtctgggccttgtctacctggtgggctacaccctgctgagcccccacatcacagacgactatctcctcacagaagactatgataaccgccctttctggttccgctgcatgtacatgctgatctggggcaaatttgtgctgtacaaatacgtcacctgctggctggtcacagaaggagtgtgcattctgtcgggcctgggctttaatggcttcgatgaaaatgggaccgtgagatgggatgcctgtgccaacatgaaagtgtggctctttgaaaccacccctcgcttcaatggcaccatcgcctctttcaacatcaataccaatgcctgggtagcccgttacatcttcaaacgcctcaagttccttggaaataaagagctctcacaaggtctctccttgctgttcttggccctctggcatggcctacactcaggatacctgatttgcttccagatggaattcctcattgttatcgtggaaaagcaggtcagcagtctaattcgggacagccctgccctgagcagcctggcctccatcactgccctacagcccttctactacttggtgcaacagaccatccactggctgttcatgggttactctatgactgccttctgcctcttcacatgggacaaatggcttaaggtgtacagatccatctatttccttggacatgtcttcttcttgagcctactattcatattgccttatatccacaaagcaatggtgccaagaaaagaaaagttaaaaaagagggaatgatctctgtctttccctggtggccgagagctggactggtgcagaaactacttgtctcccttctcacagcactcctcaccccagcagagacgccaggagctggaagtcacagcactcccagctgtgcctctgcgacagccaaaggggaagctcttgtgggaggagcagaggggctgcaccccctttggactcccccatgcacgttgccttatctctcccctctagccaggaatctgttgtttctcttctgccaatctactacgattgtatatgtgccgataccgccaccccccccatggggggagggaagggtacaaggccctgcctgctccactttttctatcttggaactataccagataaaatcacttctgtttgttcagtttttcactgctagcatcccagactgctttctttcatacataattctccatgcttgctaaaggtcatcatggtctctcattgagagccacagaaatctaggaaatcaggaacgcctactgtcaaaatctggaacaccagaatctaaggggaacagtttacactaccatgtactgctaagtttaagaaccctcaaaacaatcaggtctg

SEQ ID NO: 2316 - DNA, 2729 bp, Homo sapiens
gtaggtgccgcaaggagccggcgagcggagcgcccgctcgggaccgcagccgccgggcgacgtcgccgccgcaccgggcacttctgtctccccggagcagctcctccagctcagtctccagctccacctccggctcccgctgggcctcccgctcgccctccgcgcccggctccccgcgcgcccgtcccgagtccgctgctcgccggcggccgcccggtcatgtcaggatggagatccggcagcacgagtggctctcggcctccccccatgagggcttcgagcagatgaggctcaaaagccgccccaaggagccctccccaagcctgacccgagtgggcgcgaacttctacagcagcgtcaagcagcaggactacagcgccagcgtctggcttcggaggaaagacaagctggagcactcccagcagaagtgcatcgtgatctttgccctggtgtgctgctttgccattctggttgcactgatcttttcagccgtggacatcatgggagaggatgaggatggactctcagaaaaaaattgccaaaataaatgtcggtaagagaattgccctggtggaaaatattcctgaaggccttaactattcagaaaatgcaccatttcacttatcacttttccaaggctggatgaatttactcaacatggccaaaaagtctgttgacatagtgtcttcccattgggatctcaaccacactcatccatcagcatgtcagggtcaacgtctttttgaaaagttgctccagctgacttcgcaaaatattgaaatcaagctagtgagtgatgtaacagctgattcaaaggtattagaagccttgaaattaaagggagccgaggtgacgtacatgaacatgaccgcttacaacaagggccggctgcagtcctccttctggatcgtggacaaacagcacgtgtatatcggcagtgccggtttggactggcaatccctgggacagatgaaagaactcggtgtcatcttctacaactgcagctgcctggtcctagatttacaaaggatatttgctctatatagttcattaaaattcaaaagcagagtgcctcaaacctggtccaaaagactctatggagtctatgacaatgaaaagaaattgcaacttcagttgaatgaaaccaaatctcaagcatttgtatcgaattctccaaaactcttttgccctaaaaacagaagttttgacatagatgccatctacagtgtgatagatgatgccaagcagtatgtgtacatcgctgtcatggactacctgcctatctccagcacaagcaccaaaaggacttactggccagacttggatgcaaaaataagagaagcattagttttacgaagcgttagagttcgactccttttaagcttctggaaggaaactgatccccttacgtttaactttatttcatctcttaaagcgatttgcactgaaatagccaactgcagtttgaaagttaaattttttgatctggaaagagagaatgcttgtgctacaaaagaacaaaagaatcacacctttcctaggttaaatcgcaacaagtacatggtgacagatggagcagcttatattggaaattttgattgggtagggaatgatttcactcagaatgctggcacgggccttgttatcaaccaggcagatgtgaggaacaacagaagcatcattaagcaacttaaagatgtgtttgaaagggactggtattcaccgtatgccaaaaccttacagccaaccaaacagccgaactgctcaagcctgttcaaactcaaacccctctccaacaaaactgccacagacgacacaggcggaaaggatccccggaacgtataacatgatgaagaaactgacaggacagctctgtatttcatatttatacataaaggacttgaggagagaaaaaacactttaatatgtctctttttttagggaaaaagcacacttataaaaaatattctctgaacaacacataatacctatctaacaatatcttagcgtcgtgtacactaaaattaagacttttgtatttgttacctctgacagagaatgtcattctggcgtagaagttagtttttacgtttgcatacaaattttaagactttcattcctgctcctttctagttttagaactttttctgctgacctacccggtcagttgttaggaagcttagcatgaggtgggctctttaacaccattctgagaactgttgatttagagaggaaggtgaggattttgccttggagaagagactgataaaaccaagtgtttattcttgtaaatcgtctccaagacctacacagtcagctaagcatgaatagcttacatctcatgccagccttcaacacccttgaaaaatatccttttctgtcttgctcattttcttcttataccataagttttatttggtatcattttctcttctcacaaaatgttcctattatatagcattttctgtattcacctcaacattacttctaactatgataacatcttttgaaaacatacaaatttttcagaatggatactaagtggaaatagcagtctttcattttcacctttcaactgaatccttttttcccctaccgaattggtatttaaaaaaaatcacagtcagcaatatgtatcctttctctcaagctcagaaaaattatgtagccacctgctaatatccagcaagctatcaagtctgcattttgggaataaagtagtttttcac

SEQ ID NO: 2317 - DNA, 2260 bp, Homo sapiens
actgtggaaacatcctagctcggcgttggagttgagtcgcctgaggtccccgccgacgacgcactcaccatggcgcctgctaaccttgggctgacgccgcactgggtgatgctcctcggtgccgtgctgctgttgcttctgtccggagcctccgcgcaggaacctccgagagtgggttgctctgagtacacaaacagatcctgtgaagagtgcctcaggaatgtctcctgtctgtggtgcaatgagaacaaggcgtgtatggactacccagtgaggaaaatcttgccccctgcttctctctgtaaattgagttccgctcgctggggcgtatgctgggtgaacttcgaggccttgatcatcaccatgtcggtcctggggggctctgtgctcctgggcatcactgtgtgctgctgctactgctgccgccggaagaagagccggaagccagacaagagcgatgagcgggccatgagagagcaggaggagaggagagtgcggcaggaggaaaggagggcggaaatgaagtcaagacatgatgaaatcaggaaaaaatacggtctgtttaaagaacaaaacccgtatgagaagttctaaggtggctggcacacacttgtggtggatcgtgcagttccagagtttcctgggaatgcactccccagcagagcctgcagagacctcaccaccatggccacccttgacctgggtgatccctccagcctctactggcaccagtgtggccttaagaggacaatcctactcttgttccctctgtgtctgtatgtaatcacctgagaccttaatctcgttgatgtcctttttggggggaggaagtatacttggtccccacactctgcaagccgattacgaagctggcagcctgaggtgctgactagctgctgagtggccttgctggaagattcacattgcaacaagcaagagtcatgtttactttgttaaggcaagaactgaccaccactcttgcttcctgaaggctgtgttttgtctgtaggcccactgctgtgatgggcccttgttgttgtaattttggtggcctcttggaaggcactgtccctaagtctggtaaggattgccttcctaacccagctccatccaatagcacaaaagcttataaagtcacctgaagtctttaataatccctcaggaagcagtcctaccaaaacctgccatgagacgtccaggcctcttggatgacatttttcattttcagtctttactagactgagaatttcctgctgtgggaaacctgagctctgaatttagtttgatcctcttgtgagtgctgaatgtccagcatgctggtgcatggactccagtgtccttagaagggctttgtggagggtcttggacatctccctccacagatcaggcagctgttgagttggtcctgtatgtatcatggaggatgaacagcatctccactggccatcccattgtgggagctgagtgtgtaggaagataggaggaccccacaccattctgccttccaggaaaactgcctgagctggcatagacacccacctcacttccaccctgcttccagccatgcctcctcacctatcgtgcctgacacatccgcacgggccctgggaaggttgtcaggagacactcgggtccctgagattccgtccacgctgtacatttctttgaaatccagatgtgtcctagtaagcagatcacaaccctgatggcagggtaaggagtaaagatattctctctgggaaagcagccaccagcagatgaggtggtcttactgtaggctccctcatgcctaagacctcacctagcatctcggtaaccttttcacctgtcagtctgtccagggattaatattttcctctcttcagatttccacaaagtaagggaataacctttaccacaatctggagtcttaccatttttctgctttgctaggcatttgatggagcttaaagccttgtcaaacatttcttaagtattatagcaggcattgagagttatctttctcctgtctattgaaagggaaccctccttacaggccctgatgaacttcgtattaatatgtcgcctgtataaattgtacctgttaggttgctgagctgatgttagagtatttaattctccagcctaaggagtgcagcaggtgctcgtgggagtggtctgtgcctacctttgagcagcatgaagccacagaaccaagcctgacaccatcacaccccgtgccttagtttttaaccactgtccaataaaatggttgaatatg

SEQ ID NO: 2318 - DNA, 1748 bp, Homo sapiens
agttctttcctgcgagtaacagaaccagggagggaggtgggctgtggcctcccctgcccctacagtcgtctcctgcagctcccaccatgctggactcatcagcagcagagcaagtgacccgactgacgctgaagctcttgggacagaaagcctcttagtcattcctggagcacacagggcctttgcgtggagccaccgtctctgtcacggtctctcttcctcacagaagctggagcaagaacggcagaacgtggaagggggacctgagggcctccacctcgagccaggaaatgaggaccggccggacgatgccctgcagactgctctgaagagaaggagggaccttctgcagagactccgggaggccaccctcatgcacataaccctggaagggtcttccagtcatggccatcctgcccggagaggcgcctgtacctggcccaggctggcctgagcctgatgctgggggtgcctctgtggcgttggggctccccgtccccgtgtgcagcagctctgcatcggccttgcaggaacaacacctcctggacgagctctctcgggcccaggcctggagcgggccaagcagaggagccctcgggtcagccctgcccccagagctgccccccacgggcatcctacccactgcctccccatccccgctggccccagacccgccaaggatcatcctgcctacggtcccccagcctcctgccaccatcattcagcagctccctcagcagccactcatagcacagattcctcctccccaggccttccctactcaacggtcaggaagtattaaggaagacatggtggagctgctgctgctgcagaacgcacaggtgcaccagttggtcctgcagaactggatgctcaaggccctgcccccagccctgcaggacccgccacatgtgcccccgagggtcccgcgagctgccaggccaaggctgcctgccgtgcaccaccaccaccaccaccaccatgctgtgtggccacctggggctgccactgtcctccagcccgcccccagcctgtggacgcctggcccaccctgagtgtgagtcacagagaccctggccggggcaccctccacccccaggcttcctcagggctgtgggctgtggcgggactatggaagggagcagggagagaccctgccaccacccggagtggctacgcgagtgtggactgcaggctcctcctggggaagctgggcaggctcgctttctggtcacggggccattccagggggcatcccttgctccgggtcccctgcagtgaggggcctgtgaaccccaccagggcagcagcccctcccagggacccctcctttcctgtagggcggcgccggcccacctgggagcctcagatccccctcttccatcacggaggtaaagttgaggccgtggacgccaccagcctgatgaaataaagatttcatccagaaagagtttaagaaaatctcagctcaggagccagaacagaaaagatcaatagctttagccacatggaagtgtgaacatcctgatggggaaaataccacaaagtctaatttaataactagggacacctgtgtgccacagctgtggcacagactcccactaaagaagtaggggtgcatggctcatgcctgtaatcccagcactttaagaggctgaggcaggaggatcgcttgagctcaggaattcgagaccagcctgggtcacatagcaagaccccgtctctacaaaaaataaatttaaaaaact

SEQ ID NO: 2319 - DNA, 3334 bp, Homo sapiens
atgagtgacagaactagtttattgttctttattttattattattattattattattattattattattttattattattttgggatggagtctcgcactgttgtccaggctggagtgcagtggcgcgatctcggctcactgcaacctccgcctcccgggttcaaatgatcctcttgcctcagcctcccgagtagctgggattacaggcgcccgtcaccacgcccggctaattttttgtatttttagtagagactgggttttactatgttggccaggctggtctcgaactcctgacctcaagtgatcctccaccttggcctcccaaagtgctgggattacaggcgtgagccatcgcacctggcctgtttttattttttatttttgtttttttaaaaactttttaagagatgggtcttgctttgttacctaggctggtcttgaacgcttcggctcaagcacttggtccaccttggcctcccaaaatgctgggattacaggtgtgagccacagtgcttagcctctagttaactgttcttaaaccaggctcccttctgctgggacctacttcttgtccaccagcttctctcctctacatccctgggctgccaggacctctgtccctgccatgcagactccctgctcccagtggactgtcccctccagggagtcctgcgggccagctcttgccttgcagtgtcttcagctcctttggctaatgaatgctgcttcttactcttggtttaactttacaaaacattggtaacttataaacttgagcttgtcatttgttccgaagaattcacaggagcactctctctccctcattcaaggctcagggtggtggctcattttcaaggggctgtgaaaagagagggtcactcctttttgatcatttccctgctgcctggcttcaaatggccctcaggccaggtcactttagggaaattggtgatcgctcttggtattccacttttttttttttttgagacggagtctcgcactgtcaccaggctggagtgcagtggtgcgatctctgctcactgcaccctccgcctcccgggttcaagcaattctcctgcctcagcctcctgagtagctgggattaggcgaatgccacccctgactaatttttgtatttttagtagagacggggtttcaccatgttggccaggctggtctcgaactcctgaccttgtgatccatccgcctcagcctcccaaagtgctgggattataggcatgagccactgcgcctggcgtggaatttcactcaggtcccttcagctctctctggttctgacagatcttgcccaaattcccatggttatgtggtcatttgcttgcctgttgctgggggtggctgggaggtggcactcagctgttcgactctgaggcccaggactcctggctgctgggactcacgtgtgtccccgcacagggaggagtggatgcgggccatccagatggtcgccaacagcctcaagcagcgggccccaggcgaggaccccatggactacaagtgtggctcccccagtgactcctccacgactgaggagatggaagtggcggtcagcaaggcacgggctaaagtggtaagtgctgggagcaggggtggggctgccagcctgcggtgcccccacccccagtgctggcctgctctccttggtttccataacacagttcagggggctcagctgagagacaaggctgccctgcagggtggggtgatttcaggtggcaggtgccctagggtgtgctccatgcccgtaggggagggagcaaccttgggtggacccactgcaggttcgtcctgggagttggtgaagacctggctacccccacgtcagagcccagccctcccaaggccctgtgcctgcagagcctggtctgaaggccgcttcagaacacacagttgctgcccagagcctcccttcctgctccagcctaagccgtttggcaacagtgtcttttggttttcctctttcttttgttaaaatttcctcccacgggccatgagccaggcgctgactgcccccactctccctgtccctggcagaccatgaatgacttcgactatctcaaactccttggcaagggaacctttggcaaagtcgtcctggtgcgggagaaggccactggccgctactacgccatgaagatcctgcggaaggaagtcatcattgccaaggtgcgtgccccgggaattgcgctcgcgagcctctgtgggggctgcggtctggagcctgaccctgaggcctggacgcttacccgcgctttctgctgctgtgggcttatttcccccacaaattccccctagtcagaaaagggggagcctgaggcccagagaggagcagcaggccttgctgctgagtccccacctccaccctatgttaggggctgggggtgcctgtggagagagagagcctcggggccccacccagcaggtactgtcaagggaggctggggcctgttggggaggacgtcgctgttggggagtcccgggctttgctcagggtatcccaggtggaggccgggccaggagtggaattctactttttcccttatttgaattttttgtagtggaagattccaaagacattcaaaaatttaaaaagaaaataaatattacggacccccatgtagccattgtccagtttaaccagttatcagcgtttagccagccttgtttccttagctctgcctgtccctcttgttctggaatactttaaggcctgtcctagacaacacgtcacttcactcatccatacttgaacatgtgtcctgacagatgaagactgtaaagaatataatcatgtggtgctgccatcagagccaaccaaattagctgttcattcctgatgtgacgattgggcctaaggcagccttcctcagcctcagcactgttaacgttttgggacagatgattctgcgctgtcggggcagccctgtgcattctagggtttcagcagcacccctggcttctacccactgaagccaatactagctccccaagttgtgacaatcaaaaatgacttttgggttgggcgccacagctcacgcctgtaattccagcactttagaaggctgaggtgggaggatcgcttgagcccaggagttcgagaccagcctgggcaacaaagcaagaccctgtctctgtaaaaataaaaataaattagctgggcatagtggcgtgcacctgtagtcccagctgctcaggaggctgaagtgggaggatcagtggagcctcagaggttgaggctgtagtgacccatgttcacaccactgcactccagcctgggcgacagagccagacccccagctaaaaaaaaaaaggg

SEQ ID NO: 2320 - DNA, 2225 bp, Homo sapiens
gaatgttgaaactgtcctgcagtgattccacttctcaaagcaccaccccagggccacattcacttgggactggattcgatacaatttcaaaacgggagtcggaattccttaggaccctctgtggacaaaaagctgatacccttgttaccacaaggattcctgcacttcttctagtttgtagctttccaggagacctggcagaaacaacaaatcaaatctccatgcttaacaatcctttacctttgaagactttaaaaacaaatgaggacaccatccctgctcattcaccctgccatccgagtgcaatctacaaagtgctctcctgctgattgtttcatctccattaacgcccttgtgaagcattcccattctaccagtgaggacgctaagaacccgaggaaggtaaatgatttgcccaaggttgtacagctaccatgcggcaaaaccagaacttttcttaaaaatctagcgttctttccaccaaataacagctaatatgaacaatcagacatggggctctcaaggaaaaggttttcatgataactttgttgtgcctcggatttcatctgtcattttttgaatagctaaatgactgagaagtctaaagagctgaggaatctaaacgagaaaagatgcctccttgtctggaaagagggtgggtcatcgttacagattaatgaagcggcacagaaacatcggtaggagggggatgaagattacacatgcagttaagaagtaggctgggctgggaatctaaccctgaaaaaagacagattgcgtttatccctggattagcagtctagaaactcttcagtcactcataaaatcttctagctgaatccagagcagaaaaggtggcaggaacaagagaaggcggcaggctgagtagaaaaaaataaaacatcataaagagggaagaaaagagaaaattctaccaaaagagaggagaatgcagaagtgcagaaaacagaaagcaacaggagaaagatgacatgggcatggagcaaaaacaggtagacaaccacaaaaatccattgtgttggaactcagaaagcagaggtggccccaaatgcagaccagctgtgtgctagtgaaaatctgttgcatggtgagagtttctgaaaactgtgtggcgtctttgtcagattctagttcagaaagggacctaaaatcagtctgctgggggaacctttcagatgttggtgaggaaggataagatacagcctttctggtatgtaggtcagaagagttcagctccaggaccctgaaagaaaaagagttaaggaaacttgatcttggttggcttccaactttgcagggaaatacagctacagaggaaggagaggtagagccaggattttgaagtctacagcaaattgcaaaaactggtgagaggtagagttaccaaagagctcagggatgcagtgaaaagcaacatgagaagaatcagggcaggaagaactgaacaaactgcctgttgtcaggagcagaaatccctcccccaggtagccaaacacccatgagctggctgccagccttgctctgaggggcaggagttatccaaatcccacttctcagctgagttcaagttcctggcttagtgcctggcaacgcccagttccttccagttagcaggagtggctccacagtcaaccacttcacctcactgggcaaggaagaggccaagggtagaaggttaagaagagaaaatgctaaataaaaaggatgtttgcccctcacagttttctggacaccagtcagcaggacttagaccaaaactgcaggcatctacataaggcctaagttatgtttgtgcccaggcaaatggaaggaaaggaagaggagttctggaaattgaaaagaagaaaagtaaagttttcagagacaccattttctttctaaacttttccagagaaagatcctgattgtcatttaaaattgtgacataccaatagtttttgaaagaatctcatctgtcccatccatctacacatttcccaaaaaatgatttctagtgagtatctagaccttagccagcaggagactcactgggggctcaggagacagaagggacaatgggcctgtatcaatatttgtaaaagttgtctttctcaacctcctaggcaaaaatctttttttcacctaaggtgaaattagcattctgtgaagcaaggaaaacaaataatttagctcttagggtcatcaaataaagcattcgtttactc

SEQ ID NO: 2321 - DNA, 2854 bp, Homo sapiens
atagttcagtatctgaagggatttaaagggaaaaatatcacccccggagtgctgcctcctgaccacgctgttggacggactaaatacgtccaccaagaactgttaaaccacaaaaattcctacgtgattaaaacaacaaaattaaaaactcctcctcctcatgacatggtgatttactttggcacggcctacgtggctctcacaagggactttgctaacttcgtcctccaagaccagctcgcacttgacttactctcctggtccaaggacacttacagccccgacgaacatttctgggtgacactcaacaggattcccggtgttcctggctctatgccaaatgcatcctggactggaaacctcagagctataaagtggagtgacatggaagacagacacggaggctgccacggccactatgtacatggtatttgtatctatggaaacggagacttaaagtggctggttaattcaccaagcctgtttgctaacaagtttgagcttaatacctacccccttactgtggaatgcctagaactgaggcatcgcgaaagaaccctcaatcagagtgaaactgcgatacaacccagctggtatttttgagctattcatgagctactcatgactgaagggaaactgcagctgggaagaggagcctgtttttgtgagagacttttgccttcgtaatgttaaccgtttcaggaccacgtttatagcttcaggacctggctacgtaattatacttaaaatatccactggacactgtgaaatacactaacaggatggctgggtagagcaatctgggcactttggccaattttagtcttgctgtttcttgatgctcacctctatattagtttattgttaggatcaatgataaatttaaatgacctcagatctttgcaccagatactcatcatatacaaatgttttagtaaaaaagagaattgtagataatactgtctaggaaaataagaattaggtttctttgaagaaggaatcttttataacaccttaacagtcaccactgtgctcaaccagacagatagtgaaacagctttctgggtaattcaccaatttcctttaaaacataagctacctgaatggagaatacatcttgtttctgagtttcaacactagcatttttggcttactcatggacaaagttctgtatatagtataaagtcattaacaagaaacaggatatgctttaagacagaattcactgtctgttgcttcagtaaaaggacctcggggaataaaacatttctctcttatatgccagaatgtaggctggtccctatgtcatgtcttccattaagaacactaaaaagtccttgcaagaatggagatatgcattcaagagaggtgctatcacatagatctagtctgaagtctggaacactttcctcttctatgacccctctctccccagtattatcttacttgcaaaatggagaccaaattctatcctgtgaggcttttaattgcaccatagtatgctctgagtagctttacactgcctggtactgatagtagtggctcgatttttaagagccttcaattgtagatgaacatctctgttatttatccctcattcatccatccgttcattcattcagccttcaatcaacatctcttgagtgtctattatgtacaggacatgtactgagacaaaaaggaaacataagagctttttcactctaaaaatcttggcaataatgtcaacaccagaaagcctcctctggagaatcttacagagtgattgtagtttaatacaggaacacacagggctgtgtagcatgataccaggcccaggagatcagtaattacaaattaagggttaaatcagagattattcaacagagagggagaaaggaggagacagagggaggacctgttgtgttccagccattctggtattcctttatgtatctaatttcattcaaacctcacaacagtcttgtgaggcccttatataattactcccattttgcagatgaagtaactgaggcttagaaaggttaatagcaccggggaacaatttctctgggtgagaattgggactctgttgctggtcttctcagttcatttcctgaggtggatttactgagagaaggtgaaataaagccatatttagtataccagagaaggtagattttaagaatggtctcagtgttaatactgagaaaaagtcctgtcagttcagaaaaaatgtgaagtctactttagtattcctgtaatactaaaccgttgagtttctaaatatttatttattctaacaaaaagcaattactacaaatggatgacacatttaatgaacacaattttattttttttctgtaactgtgcttgttgaatgtcaatcatatttaaagggaatgactttgaagtaaaaccttttttcttgctactgaaaaaaatggagttgttttgggtggtaaagtgttaaggaatagggacagctggtcacacaaggaactcttgaaggccacatgtgaaaacctgtcacttgcacagaggccagtcccactaaggtgaccagagtgggctccaagcacaaactgccattggctatagatgggactgtgtccccccaaaattcatgtgttggagccttaaccctcaatgtgatggtatttgagatggggcctttggtaagggaagtttagatgaggtcacgagggtaggaccctcatgatgggatgagtccccttacaagacctctggcttgggccgggcgtggtggctcacacctgtaatcccaacactttgggaggccaaggcaggtagatcacttgatgccaggagttccagaccaggctggccgacatggtgaaaccccatctctact

SEQ ID NO: 2322 - DNA, 2208 bp, Homo sapiens
aacgcacttggcgcgcggcgcgggctgcagacggctgcgaggcgctgggcacaggtgtcctgatggcaaatttcaagggccacgcgcttccagggagtttcttcctgatcattgggctgtgttggtcagtgaagtacccgctgaagtactttagccacacgcggaagaacagcccactacattactatcagcgtctcgagatcgtcgaagccgcaattaggactttgttttccgtcactgggatcctggcagagcagtttgttccggatgggccccacctgcacctctaccatgagaaccactggataaagttaatgaattggcagcacagcaccatgtacctattctttgcagtctcaggaattgttgacatgctcacctatctggtcagccacgttcccttgggggtggacagactggttatggctgtggcagtattcatggaaggtttcctcttctactaccacgtccacaaccggcctccgctggaccagcacatccactcactcctgctgtatgctctgttcggagggtgtgttagtatctccctagaggtgatcttccgggaccacattgtgctggaacttttccgaaccagtctcatcattcttcagggaacctggttctggcagattgggtttgtgctgttcccaccttttggaacacccgaatgggaccagaaggatgatgccaacctcatgttcatcaccatgtgcttctgctggcactacctggctgccctcagcattgtggccgtcaactattctcttgtttactgccttttgactcggatgaagagacacggaaggggagaaatcattggaattcagaagctgaattcagatgacacttaccagaccgccctcttgagtggctcagatgaggaatgagccgagatgcggagggcgcagatgtcccactgcacagctggaatgaatggagttcatcccctccacctgaatgcctgctgtggtctgatcttaagggtctatatatttgcacctcctcattcaacacagggctggaggttctacaacaggaaatcaggcctacagcatcctgtgtatcttgcagttgggatttttaaacatactataaagtctgtgttggtatagtacccttcataaggaaaaatgaagtaatgcctataagtagcaggcctttgtgcctcagtgtcaagagaaatcaagagatgctaaaagctttacaatggaagtggcctcatggatgaatccggggtatgagcccaggagaacgtgctgcttttggtaacttatccctttttctcttaagaaagcaggtactttcttattagaaatatgttagaatgtgtaagcaaacgacagtgcctttagaattacaattctaacttacatattttttgaaagtaaaataattcacaagctttggtattttaaaattattgttaaacatatcataactaatcataccagggtactgcaataccactgtttataagtgacaaaattaggccaaaggtgatttttttttaaatcaggaagctggttactggctctactgagagttggagccctgatgttctgattcttcaaagtcaccctaaaagaagatctgacaggaaagctgtataatgagatagaaaaacgtcaggtatggaaggctttcagttttaatatggctgaaagcaaaggataacgaattcagaattagtaatgtaaaatcttgataccctaatcttgcttctggatctgttctttttttaaaaaaacttccttcaccgcgcctataatcctagcactttgggaggccgaggcaggcagatcacggggtcaggagatcaagaccatcctggctaacatggtgaaaccccgtctctactgaaaatacaaaaaattagccgggtgtggtggcgggcgcctgtagttccagctactcgggaggctgaggcaagagaatggcatgaacccggtaggggagcttgcagtgagcccagatcatgccactgtactccagcctaggtgacagagcaagactctgtctcaaaaacaagcaaacagacttccttcaacaaatatttattaaatatccactttgcaacagcactgaaatggctgtaaggactcctgagatatgtgtccagcaaggagtttacagtcaaacaggagagacatgcctgtagttacatccagtgtgatgggtgctgagaggcaagtacaaaccacgatg

SEQ ID NO: 2323 - DNA, 2105 bp, Homo sapiens
acttcctgctcgagagcctgctccaccacttacctgggactggagagggcgagggaggtctgagcggcccaaggtggatccccgtgagcagagccagcgaccaccccctgggccgtctgtcggtggcgatcttagaaactagaatgaaccgaagcattcccgtggaggttgatgaatcagaaccattcccgagtcaattgctgaaaccgatcccagaatactctccagaagaggaattggaaccacctgcccccaatacaaggaacatggcacccagcagcttgtctgtgctccagtgccctcccctgaaactggcaaaccaccagcctgtgtcacaacaggtcacctgcctgcgagctaaagtcctggaggaaggtgaagccagtttctttagaaggcaccctgaacttggcaaagatatttcctcatgttcctctggagccagcgagcctgagtctgagctcggagccctccctccagagcatcggttcacacttacggaaaaacgcaatagatggctgggatctcagctttcagcagcttctcctgacactggccatgaatcagacaaatcagacccaagtttacctaatgctttggcagactccttcagtggtggccaagagatgatgccccggccccggccccggcctgggccccacaggcacagggcagccccagatgtgcccacgatagacactggctatgattcccagccccaagatgtcctgggcatcaggcagttggagaggccattgcccctcacctcctcgtgttacctgcaggacctccctgggcctctgaggtccagggaattgccacctcagtttgaacttgagaggtatccaatgaacgcccagctgctgccgccccatccttccccacaggccccatggaactgtcagtactactgccccggagggccctaccaccaccaggtgccacacggccatggctaccctccagcagcagcctaccagcaagtactccagcctgctctgcctgggcaggtccttcctggggcaagggcaagaggcccacgccctgtgcagaaggtcatcctgaatgactccagcccccaagaccaagaagagagacctgcacagagagacttctctttcccgaggctcccgagggaccagctctaccgcccaccatctaatggagtggaagcccctgaggagtccttggaccttcctgcagagctgagaccacatggtccccaggctccatccctagctgccgtgcctagaccccctagcaaccccttagcccgaggaactctaagaaccagcaatttgccagaagaattacggaaagtctttatcacttattctatggacacagccatggaggtggtgaaatttgtgaactttctgttggtgaacggcttccaaactgcgattgacatatttgaggatagaatccggggtattgatatcattaaatggatggagcgctatcttcgagataagacagtgatgataatcgtagcaatcagccccaaatacaaacaggatgtggaaggcgctgagtcgcagctggacgaggacgagcatggcttacatactaagtacattcatcggatgatgcagattgagttcataagtcagggaagcatgaacttcagattcatccctgtgctcttcccaaatgccaagaaggagcatgtgccgacctggcttcagaacactcatgtttacagctggcccaagaataagaaaaacatcctgctgcggctgctcagggaggaagagtatgtggctcctccccgaggccctctgcccacccttcaggtggtacccttgtgacgatggccactccagctcagtgccagcctgttctcacagcattcttctagcggagctggctggtggcacccaggccctggaacacctcttctacagagtcctctgtctcctgagtctgagttgtcctcgctgggcttccagagcttcagtgcctggatgctgcaggtgacagaaacaaacatctatgaccacaaaaactctcatcacttcagctacttttatgagtcggtcagatgctctgtgtccttagaccagtctaaatcatgctcaaataataaaatgattattctttgt

SEQ ID NO: 2324 - DNA, 1759 bp, Homo sapiens
cttagccctggattccaaggcctacgcacttggtgatcagcactgagcagcgaggattcaccatggacctggggctccgctgggtcctccttgctgctattctggaaggtgtccagtgtgagccgcagatggtggagtctgggggaggcctggtcaagccgggggggtccctgagactctcatgtggaggctttggatttacattcagcagttataatctgatctgggtccgccaggctccagggaaggggctggagtgggtctcatacattagtgccagtggtgatgccatttattacgcagactcagtgaggggccgattcacaatttccagagacaacgacatgaacttactgtatctgcaaatgaccagcctgagacgcgaggacgcggccacttattattgtacgagagaggcgaggaatttcgaagtgactggcctggatgtttttgatgtctggggccaagggacaatggtcatggtctcgtcagcttccaccaagggcccatcggtcttccccctggcgccctgctccaggagcacctctgggggcacagcggccctgggctgcctggtcaaggactacttccccgaaccggtgacggtgtcgtggaactcaggcgccctgaccagcggcgtgcacaccttcccggctgtcctacagtcctcaggactctactccctcagcagcgtggtgaccgtgccctccagcagcttgggcacccagacctacacctgcaacgtgaatcacaagcccagcaacaccaaggtggacaagagagttgagctcaaaaccccacttggtgacacaactcacacatgcccacggtgcccagagcccaaatcttgtgacacacctcccccgtgcccacggtgcccagagcccaaatcttgtgacacacctcccccatgcccacggtgcccagagcccaaatcttgtgacacacctcccccatgcccacggtgcccagcacctgaactcctgggaggaccgtcagtcttcctcttccccccaaaacccaaggatacccttatgatttcccggacccctgaggtcacgtgcgtggtggtggacgtgagccacgaagaccccgaggtccagttcaagtggtacgtggacggcgtggaggtgcataatgccaagacaaagccgcgggaggagcagttcaacagcacgttccgtgtggtcagcgtcctcaccgtcctgcaccaggactggctgaacggcaaggagtacaagtgcaaggtctccaacaaagccctcccagcccccatcgagaaaaccatctccaaaaccaaaggacagccccgagaaccacaggtgtacaccctgcccccatcccgggaggagatgaccaagaaccaggtcagcctgacctgcctggtcaaaggcttctaccccagcgacatcgccgtggagtgggagagcagcgggcagccggagaacaactacaacaccacgcctcccatgctggactccgacggctccttcttcctctacagcaagctcaccgtggacaagagcaggtggcagcaggggaacatcttctcatgctccgtgatgcatgaggctctgcacaaccgcttcacgcagaagagcctctccctgtctccgggtaaatgagtgcgacggccggcaagcccccgctccccgggctctcggggtcgcgcgaggatgcttggcacgtgccccgtgtacatacttcccgggcacccagcatggaaataaagcacccagcgctgccctgggcccctgcg

SEQ ID NO: 2325 - DNA, 2964 bp, Homo sapiens
acttgagatcgccgacccacatagctgaaagtgctacatatccgggacaagtgagcagcactagctttctatagccaacacatctgttgggacctacttctacagatcagcttaatcaactagcatcgtgggactgaacaactactagattctccggcttcccatccacacctgcccattgttgggtgaattggactacagactccatggactccagctgcagaactccaccgagcaactcttgggtttatcccactgtgatactctgcttgtttgggtttttctccatgttcaggccttcagaggcattcttaatcccattcctgtcagaacccagcaagaatctcaccagcccagagatgacaaatgagatccttcctgtttggacatattcttacctggcaacgctgccacccgtgtttgtcctcaccgactacctgcgctacaaaccagtcatcatgctacacgttgtggccttcgccactagctacctgtttctcttgtttggccaaggtgtgatgctcatgcaaacagctgagttcttttttggggttgtctcggccacagagatagcctactttgctatacagcatggtcagcccagaacactatcagaaagtgagcagctactgtcggagtatcacactggtggcctacacagcaggctcagtgttagcccagctcctggtatccctgacgaacctgccatactctagcctttttttatatatccttggcctgtgtctctgtggctttctttttctcactttttctaccaatgcctaagaagagcatgtttttccatgcaaagtccgatagagacgattgtccaaagccactggaacaatgtactgtgcccaaggaagcccagagcaacagaactcactcagaattgtttgccaattcaaagaatctagaggacagagagatgagcaacccagatccagaaaattcagctttgagacactttgcgcattggttccaggatctgaaggagtgctactcctcaaagcaccttgtttactggtccctctggtgggcttctgccacagcaggttataaccaaatcttgaactatgttcaagtcctatgggaacacaaggcaccctcccaagattcttccatctataatggagcagtagaggccatagcaacatttggaggagctttggcttcattctcagtgggctatctgaaggtcaactgggatcttctcggagagctgggtctggctgtcttctcagctgtcatcgcaggatctctgtttctcatgaattactcacgcagcatctgggtgtgctatgctgggtatctactggtcaagtcgagctattcgtttcttataaccatcgcagtctttcagattgcagttaacctgagcttagaacgttatgccctggtgttcggcatagacacctttatcgccttggtgattcagaccatcatgactatgattgtggtagatcaaagagggctccaactgccagtcactactcagtttttagtttatgggagttacttcgctgtcattgcgggggtcttcctaatgagaagcatatacattctctgctcagctaagtgccgaaaggaagtacagaaccttgctaccacccggagccctaatgagccacacccacaagagccaagcaatgtgtcaacaaagttctaacccaattacatcaattcccgtcacaaatgggcaggattttaagatgggcagccagacatgctttgccacgcacaggcacactttatcagtacagattccaaaaccacaaccaaacttcagtctcaggctaactgcccagctaactgcaagcactccgtatatggccatggcagctgtattagttactttcttgatgctatgacaaaatatctaacaagaagcgactcaatggaggaacttaatatcttagttcacagtttgaagggatacattccattacaagagggaagacatgactgcaggataaaggagctactggacacattgcatcttcaatcaagaagtaaagaacaatgaaacctggtgttcagatcactctctcctttttattcaacgcactaccccagccaaggggatggtgctgcccacatttccagtgaatcttcccacctcagtgaacctaatacagatataccctcacagatattcaaagaggcgtatgtcatcagattccagatcttgtcaaattgacaatattaaccaccaatattaacagctgacaacccttgtttggggtccccatgaatatcaagaacttggaaattctagttctgttaagttctaagaacaaccaatgggcgtcgaaacaagccataaagaaactccctaaggatgacgatcccccaagtgagcacagataccaacagagctgacctacaattggcttatgtactttgtggatctaaaaaggcagcgcctgggatgattttcctcctgtttcgctaagtgtacttctgttgcaacctccagtgctctgaaggaatgactaggtttggtcccattgctgagagttcctcttcaacactgaaaataccatcgttctactcaaaggttgttactggatagtctcactgttctcatctttttcatcttctgtgtcctcctggactttgtgtgatcactcagacgctcctgtatgcccatggaatgctctcccatctattcccagtggccagggaaagatgattccccctcttcccaccatgaccctagataagtgtttcattgatgtagaacacttctgaaggaacttccacagctttccagcagcttttatacataagaaaacacttacagaaattaaatactaattgtttaatttatttatatgtttggtgctaaagatcaaatccagggatcatactagataagcattctgtcactaagatatatccttggccccatggatttaatttttaaatgccagagatcatgttcaataaaatattaaaatt

SEQ ID NO: 2326 - DNA, 2603 bp, Homo sapiens
taacaagcactcttagcaaactaggagaagaaggaaaatccttgaacctgatgagggagtctctcaaaagctaccagatgacatcctgctcgatggggagctgctgggcgttttcctcctgtgaccaggaaggggcgcctgccctcaccactgccacccagtctcattcaacacagagtttgtcccctgttagaaaccgagacgttggttacacgtggaggttgggagtggctcaggcaggcagaggggcttctgggaacctggccatgttccctttcagtctgggcgctacttagagcagggggcagttgcttcaataaaactttagattcccacacaggccaggcgtggtgctcacgcctgtggtcccagcactttgggaggccgaggtgggcagatcgcctgacgtcgggagttggagaccatcctggccagcatggtggggccccgtctctattaaaaatacaaagattggccaggcatggtggtatgcgcctgtggtcccagctggttaggaggctgaggcaggagaatcgcttggacccgggaggcggaggttgcggcgagccgagactgcgccactgcaatccagcctgggcgacagggcaagcctctgtctcaaaagaaaaaaaaatctacacatccctcaccacactgtacataggacagctgggtgtaaattacatctccatttaaatgcctgtcatagttttatacaactataaaatatatacgtgccaaaataaatttgataggaacattggaaccaggtaaggtgacgcatacctgtagcacttcgggaggatcctttgagcccaggaagtcgaggcttcagtgagccatgactgcaccactgcactctggcccaggcaacagtgagatcctgtcctagaaagaaaagagaaaaaaagaaaaatgcgatttggaaatgtggaggtcgaggttgacagcgacaccgaggtcgaagccatttgcccctggagagcgagagactgggctgggccgactcccacctctgtcgcgagaggcctacgggcaggggcaggtgggcagggggactgtgctgggtctctggccgcgtctggacggcaggcgacactttctccacaaaaagcgtcaagaaaccacgacacttggtttctggacttttccgcggaacagtaaccagaacaatcgccatgaaggttcgtttctgtcatggctcagtgcagcctggacgccctggaccagcccctcctgcgcctgggccacggccgctgccttcagggcatcactggtgggcggcacaaccatcctccctttggggggttaatttcatttctttcctcccttctttaatggtgaatggaggagcaccgagcaccactgcagtctcagtttcagatcccagcgcctcgtccctgcccactgccctcggccccgcccgcctgcattggcagtgccctggccccacccacccgtgtcagcaccgcccaccgccctggcaccacccaccgagttctcgcccatgaggaagggggaccctgagtggaggtttcaaaccttaggggccgtccctgccgtgcagggctctgtgaggcctcttgccacataggcttgtgtctgcaggactgtgcggcatttactcccatctcaaataccccatacagggcagactgcccctgccccacctgcccacccactccccagcctcttccgcacgcctcctctggaaggggaacgggccacagagtgaaatggggccttccagctccagtgcggggacttggaaggcctggcccggtgtgggggcccctctgccctgcaggccactctgtgcaggcctatcctcaggtgtgccctcgcccaaggcctgcacgcaccatggcttctgtggtaccagtgataacaccatgccgggcacctcctgcagtcaccacccctgggctgctagggcagagacagctgcggtggcccggtgcacctgcctggcctcaggatggccgaggcgcctggcaaggctgcagggtcccaggggcacctgtccgtactgctgggcgcctgagttcctcctgctgggcactgtcagggcagtgcgcctcaggctgtgcttgtctctgcagaaatgtcctggccccgtacgcggtgccctcggagctggtgctggtggaggagatcccgcggaaccagatgggcaagattgacaagaaggcgctcatcaggcacttccacccctcatgacccggcagactgggactgcgggtctggtggggagcagcagacgtccccttcacaccgagaaccacgggggcccgtccaagacctggcctcccttaaacctgaaccccccaaatcaggtcacgtagaatcaagaactgtttgggatgaaatcaccatgtggggtccccagcctcgggccagttgttgcagctcaaggagaccgtccctggtgtcacctctgcctggtcaccgccgacctcatctgtgcagcgcggtgcagccagcccctggccccacgtgctgaggcacctcccgccccacagtgccctgcagttgccaggctctccagggcaggtcccagaggtttcccacaaaaaacaaataaagactccactggaggaaac

SEQ ID NO: 2327 - DNA, 2995 bp, Homo sapiens
accgcagccgagaccacgactaccgggacatggactaccgttcatatcctcgcgagtatggcagccaggagggcaagcatgactatgacgactcatctgaggagcagagtgcggagatccgtggccagctgcagtcgcacggcgtgcaagcacgggaggttcggctgatgcggaacaaatcttcagcactccctcaacatcctgggccagaaggtgtcgatgcactacagtgaccccaagcccaagatcaatgaggactggctgtgcaataaggtacaggggcggtgggcagcagttgtcatggacagagacagcaacagcagtggcggcgatctctcccttcctctcccgctctttctccctccatctctccccctcccccaatctctcctctccctctgtctctctctctctctctctctctctcattctctatcccttgctagctcagcttgagtagtcaccattcctagccagccatatacaaatgtgtagtgagcgttcacttggtgcaggctctgtcctcctaaaatgcagtcttgcctggagttccagtagactttaaggaaatatatacgtggatgatgaattagtgacagtgtagacttgaagtggtggtgtggagaatgtgggcttcagagccagactggctgaaatgagactatcccagatcggccttgattttggccaaggtgcttagcctctctttgcctcactttccccatctctaaaatgtgaatattaatgacacctctcccaaaaggtggttgggaggattcagctgtgttaatgagagagtaacactcagaacagtgcctggcccacatttaacacagtcgaattgttaactgtaatcatgaaagaaaagcacagagcattctgagagcccatagcaggtagctcaagcctgaaggccactctgaccaggccaagtcaaacctgaaactggaggctgtggttttgtagtcacctctgtcttccctgaggggaagctgaggctcagagaggtggaaccatgggtgaacctttagctgtgccctgtgccttgctcctgatcacagggacttggatgccacagtggcttcaggtctgccctggggccagcattgtgattccacagtttgtagaggccccaaccctctccccaggaagtactctgcctagtcagggagagtggtgcatctgttttaaaaaaaaagccccatcagaggattggtgcttaacatttctggagagataaagacaaagtgacagtggaactccttcctgtgtttccagatagcctcaaaaccagggaattctctttttttttttttgagacaggatctggctctgtcgcccaggctggagtgcagcaatctgggctcactgcaacctctgtctccagcgctcaagccatcagcctccagagtagctgggaccacaggcgcatgccaccacacccactaatttttgcctttttatttttattttttttggtagagacagggtttcgtcatgtttgccaggctggtcttgaactcctgagctcaagcagtcctcacgcctcagcctcccaaagtgctgggattacaggcgtgagccaccacacccagcccaaaaccagggaattctcttgaactccttcccctcccctgcatcctgttggccaccaggtcctgtcacttccatcacagaaacgccaccttccctccctcgccattcccgcagtctcaacaaacaaaaagaaaacttcaaaaatagcttccagcctatcagctccctgcgagatgacgagaggcgggagtcagccactgcagatgctggctatgccatcctcgagaagaagggagcactagccgagagacagcacaccagcatggatctcccgaaattggccagtgacgaccgcccaagccctccgcgaggactggtggcagcctacagcggggagagtgacagtgaggaggagcaggagcgtgggggccctgagcgggaggagaagctcaccgactggcagaagctggcctgtctgctctgccgacgccagttccccagcaaagaggcgctcatccggcaccagcagctctcagggctccacaagcaaaaccttgagattcaccggcgagcccacttgtcagaaaacgagctagaagcactagagaagaatgacatggagcaaatgaagtaccgggaccgtgcagctgaacgcagagaaaagtatggcatccccgagccgccagagcccaagaggaggaagtacggcggcatatccacagcctctgtagacttcgagcagcctactcgggacgggctgggcagtgacaacattggcagtcggatgctgcaggccatgggctggaaagagggcagcggcctgggccgcaagaagcagggcattgtaacgcctatcgaggccctggcatcactggaaccaaaggggatcccactggagcaggtcccgaggcctccctagagcctggggccgactctgtgtcgatgcaggctttctctcgcgcccagcctggtgctgctcctggcatctaccaacaatcagccgaggcgagcagtagccagggcactgctgccaacagccagtcgtataccatcatgtcacccgctgtgctcaaatctgagctccagagccctacccatcctagttctgctctcccaccggctaccagccccactgcccaggaatcctacagccagtaccctgttcccgacgtctctacctaccagtacgatgagacctccggctactactatgacccccagaccggcctctactatgaccccaactcccagtattactacaatgctcagagccagcagtacctgtactgggatggggagaggcggacctatgttcccgccctggagcagtcggccgacggacataaggagacaggggcaccctcgaaggagggcaaagagaagaaggagaagcacaagaccaagacagctcaacagattgccaaggacatggaacgctgggcccgcagtctcaacaaac

SEQ ID NO: 2328 - DNA, 2834 bp, Homo sapiens
agtctttggcccctcccgccgggtgaggttggcaccccgtttttcctgctctgagagggaccggttgccaccgccatacttctgtcgccctgtcgtctgtgttgtgactgctttggacgtgggagtcacctgaaagccaggaaatggacttggtggctttcgaggatgtggctgtgaacttcacccaggaggagtggtctttgctggatccttcccagaagaatctctacagagaagtgatgcaggaaaccttgaggaatctggcctccataggagaaaaatggaaagaccagaacattgaagatcagtacaaaaatcccaggaataatctaagaagtcttctgggagagagagttgatgaaaatacagaagaaaatcattgtggagaaacttctagccagattccagatgacacactgaacaaaaaaacttctcctggagtaaaatcatgtgaaagcagtgtgtgtggagaagtcttcgtgggtcattcttcccttaataggcacattagagctgacactgcacacaagccgtctgagtatcaggaatatggacaggagccatataagtgtcaacaacgtaagaaagccttcagatgtcacccctcctttcaaatgcaagaaaaggctcacactggagaaaaactctatgattgtaaagaatgtggaaaaaccttcatatcccattcaagcattcaaagacacatgataatgcacaatggagatggaacttataaatgtaagttttgtgggaaagcctgcccttgtctcagcatatatcttatacatgaacgagttcacactggagagaaaccatataaatgtaaacaatgtggtaaagcctttagttattcaacttcccttcaaatacatgaaagaactcacactggagagaagccttatgaatgtaaggaatgtgggaaagcattcggtagtcccaattccctttatgaacatagaagaactcacactggagagaagccatatgaatgcaaacaatgtggaaaagccttcagatggttccattcctttcaaatacatgaaagaactcacagtgaggagaaggcttatgaatgtaccaaatgtgggaaagcattcaagtgtcccagttatctttgtagacatgaagtgacccactctgggaaaaagccctgtgaatgtaaacaatgtgggaaagcattatcttatcttaactttcaaagacacatgaaaatgcacactagaatgagaccttataaatgtaagactgtggaaaagcctttgattctcccagttcgttttgaagacatgaaagaactcacactggagagaaaccttatgaatgcaagcactgtggtaaagccttcaatcgttccagttcctttcactatcatgaaaggactcacactggagagaaaccctatgaatgtaagcagtgtagtaaagccttcatttcttccacttcctttcgatatcatgaaaggactcacactggagagaaaccgtatgagtgtaagcaatgtgggaaagccttcagatctgcctcacaccttcaaatgcatggaaggactcacactcaagagaaaccctatgaatgtaagcagtgtggtaaagccttcattttttccacttcctttcgatatcatgaaaggactcacactggagagaaaccctatgagtgtaagcaatgtgggaaagccttcacatctgcctcacaccttcaaatgcatgaaaggactcacactggaaagcaactgtatgaatctaaacaatgtgaaaaaacctttggatctgtcagaaaccttcaaattcatgaaaagacacaccctggagagaaaccctataaggaatatggaaaagcattcaacaatttctcttcctttcaaatacatgcaacaatgcacagaggacagaatgcctatgaatgtaaagagtgtgacaaagcattcatatctgccaagatccttcgagtacatgcaagaacacaccctggagagaaaccctatgaatgtaaggaatgcggaaaagcgttcaattatttttcttctttgcgtatacacaaaaggatgcacactggagagaaaccatattaatgtaaggattgtgggaaagcattcagtttgcctggttcctttcgtagacataaaagggctcacactggagtgaaaccgtatgaatgcaaggaatgtggcaaagccttcacttcttctggttcctttcagtgtcataaaaggattcacactggagagaaaccctatgagtgtaagcagtgtggtaaagccttcatttcttccactgccattcgtagacatgaaaggactcacactggagagaaaccctatgagtgtaagcaatgtggaaaagcctttatttctttcagttccattcagtaccatgaaaggactcacactggagagaaacagtatgagtgtaagcagtgtggtaaagccttcatgtcttctactgcatttcagtatcatgaaaagacccacaccagagagaaacactatgaatgtaagcagtgtgggaaagccttcatttcttccggtagccttcgatatcatgaaaggactcacactggagagaaaccctatgaatgtaagcagtgtggtaaagccttcagatctgccactcaacttcagatgcatagaaagattcacactggcgagaaaccctatgaatgtaagcaatgtgggaaagcctacagatctgcctcacaacttctggtgcatgaaaggactcacactgtagagcaaccctatgaatataagcaatatgggaaagccttcagatttgctaagaaccttcaaatacagacaatgaatgtaaacaattaaatgtttatagcagctgcat

SEQ ID NO: 2329 - DNA, 2412 bp, Homo sapiens
agaggcccactatgctggcagtagcttggaggagctgggaggtgcctgtgccctggtcttgggagcatacacctgaggtgggatggaggaaaagccacctgtggctctggctaggccgggacccagaggacatcctcagagcccaggagccctgggattatgtgagaagccagtcctcactttgtatgtatccaggcagctctctggtcttgtagttattgtcagcatccatgcttcctgactgactgtggctggctgcctcctgctgtcccattcttggcctgtggggaatgcttcatcctgggaaacccaggcccctcctccagagctgcctttgcagggtcttcacctctggctggttgcgggccacacagaggtgggagcaaggaagcctggggtcccgtctctccctgggggccacggtaggcagtgtccctgcagagtggcagcgcgttttccacaggccttctctgtttaattgcaccctctagtggaggagaaggtgaaggagcagctggaggccgccaagcccgagcccgtcatcgaggaggtggtgagtgcctggaccaccctggcatcctcgctgcttctgtgtgtcctgtttctcttcgccacttgctctccctctgccccccattccttctcgtcacttctttattcccttcccaccagcccctttgctctcgtccctctccttcctcctcctctttctcccatttccctccttctcgagcctgccctcccccttgtcctggggtggcccctccaccctgatgtgtgtctcctcccttcccaggacctggccaacctcgctcctcggaagcctgactggtgagtgttgcccgtgcgtggcgggtgcaggctgactcggggactcttggtgccagcatgggcctggggcttggcccttcctgccgtcacagtgcagagactggcagtacagacatagagttacacgagatagctactgttggaaaccagtgctgaggaggacataagtggtgggatgagaggggagtgatggagtggggctcaggcgcggggagcagcaggcccctcatgaaggccctcctgagaggttgagagcccatctgctccagagctcccatttgagcaaggccaaccgctgtctttgggggccaggagtggagggaagggcagacacagttttctgttcctgttctaccaccatagcttgttccctctggccctggtttcctcctctgtgaaatggaggtcgtcatccttcttgctgggctgagagagagtgggagagagggtgctgtgggccgggaggcttgtgtctgtcttcaccttgagccggaggtagagctatatccctctcgcctgattcttggtcgagttaacaccagctgttttaatttgatgaaacaaaagcatggggcatatgtcctgggaaacccagagccagagagaatgggctgagtgcttgtgcacttctgggtgcccacagtggaggggctgggccggtggctggaggaggagcagggcccacagtgggcaggagcaagtcactccctgatggtgaccagaggaccagagcaagagagggtctctgagaaaccatccacctttgccttagctcagtcccttgtgttgggtgggtttgtgatgctagtccccctgcctcagtgggacagggaatgatggtttatgctgggtttcggagggtacagaaggggaatgtcctggcctcttccccagggcagccccctccagcaaccgagcatgactcctaatgccagagggctgcaagaggggaggggacccaatgccacatcaggccagccttcaccttcctgcttctccctgcctccctgctccagggacctcaagagagatgtggccaagaagctggagaaactaaaaaagcggactcagagggccattgccgagctgatccgtaagtgcagtgcctgggaaggtggggtcctgcccactgggtggtggcccaagcaccgggcccctccccaccccttctgtctgccatccatcccaggtgaaaggctgaaaggccaggaagacagcctagcctctgcagtggatgctgccaccgaacaaaagacctgtgactccgactgaggcatgccctgccccaccactcgcccatcaggcctgtcctgcagaggatggtcttgggcagggatgggggctaggcttgccatcacctccagtttggcttctgagcagagactccctgcccatcaagtctgaaacccccatggatgaggtcagctccttgtctgctgggtggcccctgccattctgaatggaggcagaaccagcaacaactctgggcgtgcctgtgtctgcacatgtggatgtacatatgtctgtatatatgtatatattttgaactttctaaaaaaaaatctggaaatagaaacaagt

SEQ ID NO: 2330 - DNA, 3017 bp, Homo sapiens
agaacgccgcctcctccgcttgcggccggtctgcaccatgctgcgaacgtccgtcctccgcctgctaggacgcacgggggctagtaggctgtctctcctggaggacttcggcccacgctactacagttcgggctccctcagtgccggcgatgatgcttgtgatgtgcgcgcctacttcactacacccattttctacgtgaacgcggcgccgcacatcgggcacctgtactcggcactactggcggacgccctatgccgccaccgtcgcctccgaggtcccagcacggccgccacgcgattctccactggtaccgacgagcacgggctgaagattcagcaggcagcagctaccgcgggcctggccccgaccgagctgtgcgaccgagtctctgagcagttccagcagcttttccaggaggccggtatctcctgcacagatttcatccgcaccacggaggcccggcaccgggtggctgtgcagcacttctggggggtgcttaagtcccgcggtctgctctacaagggcgtctatgaaggttggtattgcgcttccgacgagtgcttcctgcctgaggccaaggtcacccagcagccgggcccatcgggggattcgtttcctgtatctctcgagagcgggcatccagtctcctggaccaaggaagaaaactacattttcaggctttcccagttccggaagccactccagcggtggctgcggggcaaccctcaggcgatcacccccgaaccatttcatcacgtagttcttcagtggctggacgaggagctgcccgacctgtccgtgtctcgcagaagtagccacttgcactggggcattccggtgcccggggatgattcgcagaccatctatgtatggctggatgccctggtcaactacctcactgtaattggctacccaaatgctgagttcaaatcttggtggccggccacctctcatatcataggtaaggacattctcaaattccatgccatctattggcctgccttcctgttaggggccggcatgagcccgccacagcgcatctgtgtccattcccactggacagtctgtggccaaaagatgtccaagagcttgggcaacgtggtggatcctaggacttgccttaaccgctataccgtggatggcttccgctactttctccttcggcagggcgtccccaactgggactgtgactactatgatgaaaaggtggttaagttgctgaactccgagctggcagatgccttgggaggtctcttgaaccgatgcactgccaaaagaataaatccttctgagacctacccagccttctgcactacctgcttccctagtgagccagggttggtggggccgtcagttcgtgctcaggcagaggattatgctctggtgagcgcagtggccactttgccaaagcaggtagcagaccactatgataactttcggatatataaggctctggaggccgtgtccagctgtgtccggcaaactaatggttttgtccaaaggcatgcaccatggaagctgaactgggagagcccagtggatgctccctggctgggtactgtgcttcatgtggccttggaatgtttgcgagtctttgggactttgctgcagcctgtcaccccaagcctagctgacaagctgctgtctaggctgggggtctctgcctcagagaggagtcttggagagctctatttcttgcctcgattctatggacatccatgcccttttgaagggaggaggctgggacctgaaactgggcttttgtttccaagactagaccagtccaggacttggctggtgaaagcccaccggacctagaaactcagttcttaccggcttgtggtaaaaaagcaaatgtgttatctttttattttttattttcaggaaagttatactagtattttcttaagtgtggaatcaaatgagcacataagctgtgtccctgtgaaaagaggtttgtagcctttcaggtgcctgctcctattcatttctctgtgaccattgatcactgtcctttgtgcattgtgtgtctaagatgtcttcaggggaaagatgggtaagagacagtgttgctaatgctgttccttctttgtgcctccttccaaaccacagttatttgcccaaactacctctcgtggctggtttttcattggcctgacctctgcttctcaggctaattagtgactcctttctttgagggtcagggttggaggccccttactggtggttttacagggggatcctactttgttacacatgttgggtttcctgataaaaagagagtattttattaaacccttgaaccagtgtcctagaccagatgatttttgcccatgtgtatccccatttaaattcctacaactaagtctccctgctttgttaatagtccaacagttgggttgtgtaacatcacacttcaaccggtagatggctctaatctcacacatttacttactaaagattgaggattcggaatatttagaataaattagttttctgctttctaattttgcagatctttacatttttattgcttttcttaaaataagggatagctttgcaaccactattgttttaatggaaagcaaaaaacccccccaaacttatcagaatcctcgttctttttcagactactgaaaaatgacatttactctgttaaatgtttaataagtgaataagtaaatgtatcaagttgtttatataataaattataaaactcttgaggcacttggtatgttaaaaattttaaactttagtaacattaggttacaggtatgatttaaaaatttgtaaatagttcaaaagggcaatgttttctttatatttcttatagtcttaattttgttatccatgtgcataatttacctcatgatttcttttggtcaatcaggatctttaatacaatatagaaattgtgtaatagttattataaatgttaatacacaactttcaggtaattttaactgattatttcttttgctcttttaacttaagttattaaagtttaaaagttcgt

SEQ ID NO: 2331 - DNA, 2582 bp, Homo sapiens
ataacaacttatgtgaaagtcaaaaaggcatatgcttgacaccttgactgtgtgattcacaccacgctcattaagcttgcctacattaggagctgcatgcagaaccaaaggctgtgtgaagacaaggtctcatctgagtagcagcttcctgccctccttcttggagataagtcgggcttttggtgagacagactttcccaaccctctgcccggccggtgcccatgcttctgtggctgctgctgctgatcctgactcctggaagagaacaatcaggggtggccccaaaagctgtacttctcctcaatcctccatggtccacagccttcaaaggagaaaaagtggctctcatatgcagcagcatatcacattccctagcccagggagacacatattggtatcacgatgagaagttgttgaaaataaaacatgacaagatccaaattacagagcctggaaattaccaatgtaagacccgaggatcctccctcagtgatgccgtgcatgtggaattttcacctgactggctgatcctgcaggctttacatcctgtctttgaaggagacaatgtcattctgagatgtcaggggaaagacaacaaaaacactcatcaaaaggtttactacaaggatggaaaacagcttcctaatagttataatttagagaagatcacagtgaattcagtctccagggataatagcaaatatcattgtactgcttataggaagttttacatacttgacattgaagtaacttcaaaacccctaaatatccaagttcaagagctgtttctacatcctgtgctgagagccagctcttccacgcccatagaggggagtcccatgaccctgacctgtgagacccagctctctccacagaggccagatgtccagctgcaattctccctcttcagagatagccagaccctcggattgggctggagcaggtcccccaaactccagatccctgccatgtggactgaagactcagggtcttactggtgtgaggtggagacagtgactcacagcatcaaaaaaaggagcctgagatctcagatacgtgtacagagagtccctgtgtctaatgtgaatctagagatccggcccaccggagggcagctgattgaaggagaaaatatggtccttatttgctcagtagcccagggttcagggactgtcacattctcctggcacaaagaaggaagagtaagaagcctgggtagaaagacccagcgttccctgttggcagagctgcatgttctcaccgtgaaggagagtgatgcagggagatactactgtgcagctgataacgttcacagccccatcctcagcacgtggattcgagtcaccgtgagaattccggtatctcaccctgtcctcaccttcagggctcccagggcccacactgtggtgggggacctgctggagcttcactgtgagtccctgagaggctctcccccgatcctgtaccgattttatcatgaggatgtcaccctggggaacagctcagccccctctggaggaggagcctccttcaacctctctctgactgcagaacattctggaaactactcctgtgatgcagacaatggcctgggggcccagcacagtcatggagtgagtctcagggtcacagttccggtgtctcgccccgtcctcaccctcagggctcccggggcccaggctgtggtgggggacctgctggagcttcactgtgagtccctgagaggctccttcccgatcctgtactggttttatcacgaggatgacaccttggggaacatctcggcccactctggaggaggggcatccttcaacctctctctgactacagaacattctggaaactactcatgtgaggctgacaatggcctgggggcccagcacagtaaagtggtgacactcaatgttacaggaacttccaggaacagaacaggccttaccgctgcgggaatcacggggctggtgctcagcatcctcgtccttgctgctgctgctgctctgctgcattacgccagggcccgaaggaaaccaggaggactttctgccactggaacatctagtcacagtcctagtgagtgtcaggagccttcctcgtccaggccttccaggatagaccctcaagagcccactcactctaaaccactagccccaatggagctggagccaatgtacagcaatgtaaatcctggagatagcaacccgatttattcccagatctggagcatccagcatacaaaagaaaactcagctaattgtccaatgatgcatcaagagcatgaggaacttacagtcctctattcagaactgaagaaagaacaaagttcaagattttccatgtctttgtaacacttagccctgtgcaaatcagagtatgtgagtggaagaaggggtgagtcctaactgtacatctcggatataacaaatgtgcaaattctgattgattgccctgtaaaatgaattattctcatgcagtgctctacttgacttttatctttgaattcacaactaaaaacccatagcccagaaatctaaaaaaagtaattttagtggagcctttgaaaataaaagaccattggaaaaag

SEQ ID NO: 2332 - DNA, 2376 bp, Homo sapiens
gaaagtgaaggagagttggtgatccagaagctgttgtatcatgagtgcctctgctctgagctccatcagattcccaggaagcatctctgagtaccttcaagtagcctctgtgctcagcctgctcctgctgctcttcaagacagcccagctctacctgcacaggcaatggctactcagcagtactcagcagttcccatccccaccttctcactggctctttggacacaagatcttaaaggaccaggaccttcaagatattctaactaggattaagaatttcccaagtgcctgtccacagtggctctggggaagcaaagtgcgcattcaagtgtatgaccctgactacatgaagctgattctggggagatcagacccaaaagctcatggttcctacagatttctagctccctggattgggcgtggtttgcttctgctggatggacagacatggtttcagcaccgacgaatgttgaccccagctttccactatgacattctgaagccttacacggaaatcatggcagactctgttcgtgtcatgctggataaatgggaacagattgttggccaggattccaccctggagatcttccaacacatcaccttgatgaccttggacaccatcatgaagtgtgccttcagccatgagggcagtgtccagttggacagaaaatacaagtcctatatccaggcagttgaggacctgaacaatctcttttttctccgtgtgcggaacatctttcaccagaatgacatcatctacagagtgtcctctaatggctgcttggccaacagtgcctgccaacttgcccatgatcacacagaccaagtgatcaaatcaaggaggagtcaacttcaggatgaggaagagttggaaaagcttaagaagaaaaggcgattggatttcctggacatcctcctatttgccagaatggaaaatggaaaaagcttatctgataaggaccttcgtgctgaagtggatactttcatgttcgagggccatgacaccacagctagtggtatctcctggatcttctatgctttggccacaaatcctgaacatcaacagagatgcaggaaggagatccaaagtctcttaggagatggggcttctatcacctggaacgacctggacaagatgccctatactaccatgtgcatcaaggaggccctgaggatctacccccctgtaccaagtgtgagcagagagctcagctcacctgtcacctttcctgatggacgttctttacccaaaggtatccatgtcatgctctccttttatggccttcatcacaacccaactgtgtggccaaatccagaggtgtttgatccttctcgatttgcaccagggtcttcccggcacagccactcattcctgcccttctcaggaggagcaaggaactgcattgggaaacagtttgcgatgaatgagctgaaggtggctgtggccctgaccctgctccgctttgagctgctgccagatcccaccagagtcccaatccccataccaagaattgtgttgaagtccaagaatgggatccacttgcatctcaaaaagctccaataatcttcacagaacaagacagctcaaatggcctgctgcctgccattctgtctttctgtcactcactcttttccccaatccttctgctcacatctcattctttcttctcaccttgttcacctccacccaccttctgctgggcttccagtctccttgcctgtcagtctttttcaacttcttctgagatccctacttgcttttctctctacctgtccctaaccagactgcatgtttgacctttgactttaatgatctccctaacttgcaccctgcctttcttttctgtgtatttccttctcttctactgcttgtctatccttaaattgggcttattctgatgtcataattaattaaaagataagtgtgtgctcttatgattctagatatcgagtgtttttgatgatttcactggaatgaagctgagttcattgcaatgccatcactccttgggtatcgctgtgcctctttttacctttccgtcacctatagctgcattccttggtttcaagagccctcctaagtgttaaaatccaacaccattgttaagcatctcttctgtctccagatcatttctccatctttccaatgtgtatgcttgttttgtgcctaaaagggtaatactggtcctgttcttagttctatcaagattaggacatgcatatctgaaagagccaattttcaaccaacctaactgagaccttccctgactgtcacctcatctatccatataaatctccccttcaaactctccacctttcagcttacatttaagagtcttgccatcttccccacaataaagttcataatgtggc

SEQ ID NO: 2333 - DNA, 3517 bp, Homo sapiens
taaactaggcctctcttcaggcatcagaaccaaattagagtgctttatacgtgcaaggaactaatgcagaaagacattatgggtaagtcaagggagatgccccagccattgggcaaattcctctgactcctccctgatggaactaattctttttcttctgtgcccggatcctagaatcaagattcttaaggtctgagtacaagttccgcttcaggatggcgctgctgcacagcagggcaccttgcagggccccgaccagtccacaggtgaagatatcctggcctaggaggcaagagcagaggcccctgagcgtgcacccaggcaggcccaggggagggtggggccttggtgctcttccctccacatgagggccacccagagctggctccaatcagacaggggccacagcctgcccaggcagccctgctcaggggatgggaggctgcaggggacagcagggcctgagggcaggaacagaggacgttgggcgacaggggcccagggtctcaggtcctgacaacatggggcagtgagtatacctgtcagatagaggttggggatggggctctgggccctcaaggaggccatcacacaagggtgcaggcggcccaggtcatggtcagccccgtagcaggcacctcggggagcagccagatagaactggttggtgagtggggatcctgcagtcacactctccacctgagggcagaaagggtggggcaggcatgtgagatcctggctcccctccctcttccgctctttcccattcactgactgcagggatgggtgccctgtccttccctggggctcatgtcttggggcccaattcccctgtctcaaggaaagggcagaaatagcaccatgaggtccgtcaccaccccaaatactttaccccctaccttcccctccagctgtgggaacagtttcaggaccactgacatagaggcttccacaaaggagtttttgaaggtctcatagtcactgccctactttcccttcagttccacctgccactcctcaaaccactcgtaggtgctgggtatgagcatgatcatggtggaccggcctggggatcagagctgatattactactgcccggcctctccctccaccccctcacccaggacgtgcaggcccccgtgggaatcggtcctcccaggtcggatccttggctgatgggaaagcgaagaagagaagagggatgtgttccgcagcctcttccctgggcatggagatgtagcgctccatcctgcgtgtgacaagagtgtggtgcgatctccaggcttttgtcctcaaaaccccagaaccactgcaaggactgctcgtccctagggactccccacaggggtgaagctgagccacagccttggtgtgacaaacttccaggtgcaaattggaaattgcctacttcctcccattccataacttctgctcgttctctgagtcaagcagggaggcacgggccacacacacacgtgcaccttacgcctggtccatgtccgtgtcatagtaaacatagtagttggtggacggcagatgcaggtcctccttggtgcctcgcaggcagatgaaaacagaggtcatgcctaagccgggctgaactgtccccagctgctgcttcacacctgcaaaggggagtggttggtgcctttgtggaccatggccggagacagccactccctgctcccaggagagcctcagggtgaccgctcgctgtgtcctgagccttatcttcagttgccagctttgtgcccaggccacttttacagctgtttcaacttgatgttggcaggggcctgctcttctgtgtcctcctgcctgggaaggacactgccccaggttcctattcttccacctcccctgcctctgctccaagccccttcagaggcaggtaaagcccagccctggtcctcagcccccatgagctggctcagcacctgcaggaaggtcaagcttactgcctcccatcttccccttcgtgtcttgaagtgtggagcacatgactgggttccccccatgaagaccacacatgaacagcagctcattaccagcctgatttcaggatgaacttttatgcagtcacggagtgagtgaacatgcatgattcttagtgtgacatcagaacacaaggcctccagagggatgccaatgcatgtgagcaaaggcaggcagcctgactggtacttggcatctcaggactcagctggagggaggagggaagaactacactatggcagaggccacagccactgtggggcacctgatgttccccagacctaaacagctgggcttccccactcctcagcagatgacctgagaccggtgttccggaaactgcccccacagattcttctgctgtcttcccattcccgtgccagagggatgccgggtccctggctcctctgctttttccattttttaaaaaatttatttatttttagatggagtcttgctccgtcgcccaggctggcatgcagttgcgcgatctctgttcactgcaaccgcctcccgtgctcaagcgattctcctgcctcagcctcccaagtagctgggattacaggcatgtaccaccacacccactaatgtttgtattttcggtagagatggggtttcaccacgttggccaggctattttcaaactcctgacctcaagtgatctgcctgcctcgtcctcccaaagtgctgggattgaaggcgtgagtcaccgtgcccggcctgcttcgttcatgtaactaaatatttgtgaggccctcaggttgtgttcaggaggaagagacacaggaacacagatggagggcaagagggacagatggctctagctgggctgcctgggtgagatgctggggcctggccaggacagtgtcagttcccagaggtcctgggacaggggagaagggaggtcagggtcacagagagagaggcaggaagtagcaaaggcagagtctgcctgtgcaccaagcccgacccccctgctctgcccctgggccgtctctacctcaccccctcagctcccccggtctgagagaggggaggccgagcaggctgcagacccagccacatggggcaggggaaggagaggctggcattggtggagccacccactgcactgccagtcatacaaagaagtctatcacacagaattatgtgcagtattttttttttttgagacagagttttgatcttgtctctcaggctgggttgcaatggcacaatctcggctcactgcaacctccacctcctggcttcaagcgattctctggcctcagcctcccgagtagctgggactacaggcggccgccaccatgcccgggtaagttttgtatttttagtagagaggtttcaccatgttggccaggctggtctcgaactcctgacctcaggtgatctgcccgtctcggcctcccaatgtgttgggattacaggcgtgaaccaccgcgcctggcctatagtactttttaatgaacgaaatgactatgttactggtttatgtatttgctatatttttattgttttaaac

SEQ ID NO: 2334 - DNA, 2096 bp, Homo sapiens
gctcgcgatttcccggctttctggacctgcggaattctattcccgcggggatttgatggcgtgcgcgatacagttggcttcctcggaggcgcgagatcgcgcgagaccaagagatagaccatttctgcaaaagcggcagcttggcgctggagtttggttgttgggggaaagaacttccaatactatgttgaattggaatggagagagagggcatccttgtcttgtgctggttttcaaacgaaatatagaagcagattttaaaagcagtttctcttcagaacatttttttttcataccacttgatgactgtaattgcaaagaagagcttgctgtgatatctgatggcagaacaatagtgtgctaccaccattctgtggacatttcatatgagcatacaaaacaaaccctcaatcagattctgtgcatgataatgaagaaacatatgttcaagtgctgaaaactagattggaagataaagatactgatcctggagtgctacaggacctagaagaggtcttttccaagaggcctgggacccgaggccagttagctatgttgtagaactttcatgaacccttatattttacataggtaggattaaggaaaaatgaatgttagaaacagagtttaaaaattaagtttgagcatggaatatatgtagaaattgatcagtattcctgcttgctttttcagggtaacatggggaagaaaaaaacattatttcaggttgattaaataatgcatttgtcattatttcagctgacagaggagtcaccttctttcattggttataacttccaggtgcctactttccttaagcaaggtggaaacaccctaaggcaagggacttggagattattgtttttattcactatatgcttgttttgttgtgtcgaggaatcagaatccaggtgcaatatttttcttgattcaaaacattccaaacaggtatttacatgaaaaaccattttaggtattaaaaaaagaggcagtactgtactacatgtcaatcccatgggaactcccttctgattatgtaatacacttcccaaagagttacggtatactgatcaaggaaagtatccaccattattgatttttaaaaattcttacataacgtacaaaatgtgaatgctcacaagaaataagaccattttagcaagctcctaaataggctacctttttttgtttttgagacagggtctcactctgtcacccaggatggagtgccgtggtgcaatctcggctctacaacctccgcctcccaggttcgagggattcttgcacctcagccacccaagtagttgggattacaggtgcaccccaccacgctcggctaatttttgtatttttagtggagactggctttcaccattttggccagggtggtctggaactcctggcctcgtgtgatccgtctgcctcggcctcccaaggtgctgggattacaggcgtgagccaccatgcctgatctgtaataggctatcttaatgacaattttgagtctggagaatggagctaatgctaatgtttatcctaaaaattaggctactttcgtgtttctgattctctgtgtatgtttaatataatcattgttccaacatatattccaaatccaggctaggtatatgaattagttcgttcacgctgctataaagatactacctgagactgggtaatttataaagaaaggagagttaattgactcacagttctgcatggctggggaggcctcaggaaacttacaatcatggcagaaggcaaaggggaagcaagtaccttgttcacaaagtgggaggagagagagagagcaaagtgggaactgggaaacacgtttaaaccatcagattttgtgagaactccctgactatcatgagaacagcataggataaatcatccctttgatccaattacctcccaccaggtccctcccttgatttgggtgggaacatagagccaaatcatattggtatatttatcccaaagtaattccagtgtcatctctaatctaacttagttctgaataccattgcttttttaccgtgtgatctgaataatttttcatttttttaaataaaaataccttccatttattg

SEQ ID NO: 2335 - DNA, 2404 bp, Homo sapiens
agcgccgtcatgagacccgactggtggagattgacaatgggaagcagcgtgagtttgagagccggctggcggatgcgctgcaggaactgcgggcccagcatgaggaccaggtggagcagtataagaaggagctggagaagacttattctgccaagctggacaatgccaggcagtctgctgagaggaacagcaacctggtgggggctgcccacgaggagctgcagcagtcgcgcatccgcatcgacagcctctctgcccagctcagccagctccagaagcagggcccttgggagctcaccaaaccctcccacccccttcagctggcagccaaggaggcgaagcttcgagacctggaggactcactggcccgtgagcgggacaccagccggcggctgctggcggaaaaggagcgggagatggccgagatgcgggcaaggatgcagcagcagctggacgagtaccaggagcttctggacatcaagctggccctggacatggagatccacgcctaccgcaagctcttggagggcgaggaggagaggctacgcctgtcccccagccctacctcgcagcgcagccgtggccgtgcttcctctcactcatcccagacacagggtgggggcagcgtcaccaaaaagcgcaaactggagtccactgagagccgcagcagcttctcacagcacgcacgcactagcgggcgcgtggccgtggaggaggtggatgaggagggcaagtttgtccggctgcgcaacaagtccaatgaggaccagtccatgggcaattggcagatcaagcgccagaatggagatgatcccttgctgacttaccggttcccaccaaagttcaccctgaaggctgggcaggtggtgacggtgagtggcagggcgcttgggactctggggaggccttgggtggcgatgggagcgctggggtaagtgtccttttctcctctccagatctgggctgcaggagctggggccacccacagcccccctaccgacctggtgtggaaggcacagaacacctggggctgcgggaacagcctgcgtacggctctcatcaactccactggggaagaagtggccatgcgcaagctggtgcgctcagtgactgtggttgaggacgacgaggatgaggatggagatgacctgctccatcaccaccacgtgagtggtagccgccgctgaggccgagcctgcactggggccacccagccaggcctgggggcagcctctccccagcctccccgtgccaaaaatcttttcattaaagaatgttttggaactttactcgctggcctggcctttcttctctctcctccctataccttgaacagggaacccaggtgtctgggtgccctactctggtaaggaagggagtgggaactttctgatgccatggaatattcctgtgggagcagtggacaagggtctggatttgtcttctgggaaagggaggggaggacagacgtggggcatgcccgccctgcctctctcccccattcttgttgcatgcatatcctctcatttccctcatttttcctgcaagaatgttctctctcattcctgaccgcccctccactccaattaatagtgcatgcctgctgccctacaagcttgctcccgttctctcttcttttcctcttaagctcagagtagctagaacagagtcagagtcactgctctggttctctgtccccaagtcttcctgagccttctccccttttatgtcttccctctcctcctccgggcccctagcctcccaaacccccattgcccgctggctccttgggcacagaaccacaccttcctgcctggcggctgggagcctgcaggagcctggagcctggttgggcctgagtggtcagtcccagactcgccgtcccgcctgagccttgtctcccttcccagggctcccactgcagcagctcgggggaccccgctgagtacaacctgcgctcgcgcaccgtgctgtgcgggacctgcgggcagcctgccgacaaggcatctgccagcggctcaggagcccaggtgggcggacccatctcctctggctcttctgcctccagtgtcacggtcactcgcagctaccgcagtgtggggggcagtgggggtggcagcttcggggacaatctggtcacccgctcctacctcctgggcaactccagcccccgaacccagagcccccagaactgcagcatcatgtaatctgggacctgccaggcaggggtgggggtggaggcttcctgcgtcctcctcacctcatgcccaccccctgccctgcacgtcatgggagggggcttgaagccaaagaaaaataaccctttggtttttttcttctgtatttttttttctaagagaagttattttctacagtggttttatactgaaggaaaaacacaagc

SEQ ID NO: 2336 - DNA, 2984 bp, Homo sapiens
attgtgggatcgcggagccgtccctgagacgctgggatccgcagaggagcccacttgagagcgcctcctgtcgtctgtaaggttgccttgccatccctcggcaccccaacttcccccgcccccccatcgcctcctcctccatcctccagttcaaaatggcgacggcggcggcagcggcggcggtgatggctcctccgggctgcccgggttcgtgccccaacttcgccgtagtctgctccttcttggagcgctacgggccgctgctagacctgcctgagttgccgttccctgagctggagcgggtgctgcaggcgccgccgccggacgtcggcaacggagaagtaccaaaagaattggtggagctccatttgaagctgatgaggaaaattggcaaatctgttactgcagacagatgggaaaaatatttgatcaaggtaactagtatttgtaaatttcctgctctattactgaaatattactctagcataaattgatattatgttttataatacacataatttttaattagtttactaaaagtaagactatggctccaaaatccacatgactgcaagtatgtgattctcttcttttgctactacttagtagcagtcttgagtcctgaagttagatttcagaagtgttatatctcttttgtgcctaacactgtgctcaggacttttcatgtcttttctcatttaattcttaaaatcaccctgatcacatcaagtaagaaactaataaggctcagggatgttgtcatttttactttagttcacatagtatgcatagacttatttagtggttcccctagactctgttatatagaacagaggtccccaacccctgggccacagaccaatagtggtcatccccattcctctccttaccatgtgagctctgcttcctctgagatcagctgcggcatagattctcataggagtgcaaaccctatcgtgaactgcacatgcgaaggatctaggttgtgcactccttatgagaatctactgactgatgatccgtcactatctcccatcacttccagatggggccatctagttgattcaaatgtaatgcatttgaatcatccccaaaccatctccctcccacccaccacccccagtctgtggacaaattatcttccgcaaaactggtccctgatgccagaaaggttgaggaccactgatacagaaacatgccatctttttcgttcctcagaatttttgcatatatggtatcttctgcctggagtaccttcccaccagtttgttttcctagccaacttatttgtcctttaggtctcagctcaagtagtactgtctccttgagtccttctctcaggaagatgttccttcatggatttatgtttaaccctattttagaaactgtcatatggttttatattgaatgttcattatgtaccaggcgctgtttagtgcttcctttgcattatctcaactttaaaatactgattatcctcattttactcacaaggaaattgattttgagaaactaaatagagtaacttgtctggtctcacattgctaaaaacgacagagccagcattcaaatccaggacttggtgaatccagtactttaaaatatcactgatgaaatgttcctcacatttgtcttttgtgtatattgtaagtttcttgaaggcttcttttaatctttttttttttttttttttaaagacagtctcactctgtcacccaggctggagtgcagtggtgctgtctcggctcactgcagcgtccacctcctgggttcaagcagttctcttgcttcagcctcctgagtagctggggctacaggtgcgtgccaccatgcctggctaattttttttgtattattagtagagacagggtttcgccgtgttggccaggctggtctcgaactcctgacctcgtgatccgcccgcctcggcctcccaaagtgctgggattacaggcgtgagccaccgtgcccggcggcttcttttaatcttttatgcatcagtattagatggatcaattaatcactgagataattttagttttctttcccttgactgccagtaagcttaactttgttatatttatttattagttataatcattagctagttttctgatggaatttttaccttccctgttacatggctcttacagtgctctcgtctttctccttgtggcatcattgtacatatgtattactgaaagctgtttcttttccttttgaagtaaatggaatataattaatataaaattctgtttaaatccagagcaagtatctggcatctgctaggccttgttgctttgctcatagcagacattaccaacctaagccttcctgctaagcctagacttagcagactacattattacacaaatcagtcagcattggcatctatttgtcatctattgttagtaattccctaagacagctgaactaagacctatagaatgagcagaaattttgttaggaaataaccagtagcttagccctactgtaatagaaagtaccttgagaaaatgacagtgagtggaggcctaacagtcatgtgttcaggaggttactgtgataatccaactgagcaataaggagacctgaattaaggttttggcactagggatggaaaggagggggtggatgtaagagctatttggaaggtaaaatcaacaactattgataattgatagtgagagagaaagagagagaggtgtctaggaactgagcttaaccaagggcattcatttgttattgtgctgtaacttgcatttgctaacgtacattcatccgtagtagacaggacctcaaaaatctaggcggatgactttttactttgacagcggaattacccttctaaaaataaggaaacccagctaggcacggtggctcacatgtgtggtcctagcactttgggaggctgaggcgggtagattgcttgagctcaggagttcgagaccagcctgggcaacatggcgaaatcccatctctac

SEQ ID NO: 2337 - DNA, 2322 bp, Homo sapiens
cagtatatgtgctgccaaagcaagcatgacttaatttttttagagcagttttaggtttacaataaaactgagcagatttctcgtatatcttctgcccccacacatgcatagtctccttcattatcaacaaatcccctaccaaattggtacatatgttacagctgatgaatgtacattgacacatacttattatgcagagtccatagtttaccttagagttcacttttggttttgtatattctatgggtttggacaaatgtaaaatgatgtgtgtccaccttatagtttctttctttttttttttgagacagagtcttgctctgtcgcccaggctggagtacagtggcgcgatcactgcaacggctcactgcaacctccgcctcccaggttcacaccattctcctgcctcagcctcccaagtagctgggactacaggcacccgccaccacgcctggctaatttttttgtatttttagtacagatggagtttcaccatgttagccaggatggtctcgatcttatgcctgtaatccctgcactttgggaggccaaggtgggttggattccttagaggatcacgtgaggttgggagttctagaccagcctggccaacatggtgaaaccctgtctctactaataatacaaaaattagccaggcgtggtggcacagtaatcccagctactcggaggctgaggcaggagaactgcttgaacccgggaggtggaggttgcagtgagccgagatcgtgccattgcactccagcctgggtgacaaaagcaaaactgtctcaaaaaaaaaaaccaaaaaacagtatgggttccttgaccatcctggtcagcataactttagggggttaagcggggtgaaaaccatctaaggacacagaggtggccttagcttgaaataattgtccccatgtctagaaaatgttcctgggggttccatagttgatgccctagccatgccatgttgccccagaaggagagtggggacctggcctagaatgtcttgactttgaattcccttggcaggttgtatgaaatcttggaattggctgaggacatggaaattgacatcccccacgtgtggctctacctagcggaactggtaacacccattctgcaggaaggtggggtgcccatgggggagctgttcaggtaagtccccctgggtggaattcaggggaggtaaagaccagaggaaaggtggtagggaaatggctgggttggataccctggtttggagggagatggagtagtggtgagagaactgtggaggctgtcagcattaggtttttctcttcttgtagggagattacaaagcctctgagaccgttgggcaaagctgcttccctgttgctggagatcctgggcctcctgtgcaaaagcatggtgagtgagggccaggagtccagagatgcctcccacggtgtggttttggctgtttgctgtggccctgaagcttcatggtccattggtggagtggagtgatggtgatgacaggattgtgttggtacctgggagaggaaatactgagggtcctaaaaaggtggggacgctgtggcgagaagccgggcttagctggaaggaatttctacctgaaggccaggacattggtgcattcgtcgctgaacagaaggtggagtataccctgggagaggagtcggaagcccctggccagagggcactcccctccgaggagctgaacaggcagctggagaagctgctgaaggagggcagcagtaaccagcgggtgttcgactggatagaggccaacctgagtgagcagcagatagtatccaacacgttagttcgagccctcatgacggctgtctgctattctgcaattatttttgagactcccctccgagtggacgttgcagtgctgaaagcgcgagcgaagctgctgcagaaatacctgtgtgacgagcagaaggagctacaggcgctctacgccctccaggcccttgtagtgaccttagaacagcctcccaacctgctgcggatgttctttgacgcactgtatgacgaggacgtggtgaaggaggatgccttctacagttgggagagtagcaaggaccccgctgagcagcagggcaagggtgtggcccttaaatctgtcacagccttcttcaagtggctccgtgaagcagaggaggagtctgaccacaactgagggctggtggggccggggacctggagccccatggacacacagatggcccggctagccgcctggactgcaggggggcggcagcagcggcggtggcagtgggtgcctgtagtgtgatgtgtctgaactaataaagtggctgaagaggc

SEQ ID NO: 2338 - DNA, 2041 bp, Homo sapiens
ctcgcccacgttatggcgcccgaggagaacgcggggaccgaactcttgctgcagggttttgagcgccgcttcctggcggtgcgcacactgcgctccttcccctggcagagcttagaggcaaagttaagagactcatcatattctgagctgctgcgggatattttgcagaagactgtgaggcatcctgtgtgtgtgaagcacccgccgtcagtcaagtatgcctggtgctttctctcagaactcatcaaaaagtcctcaggaggctcggtcacactctccaagagcacagccatcatctcccacggtaccacaggcctggtcacatgggatgccgccctctaccttgcagaatgggccatcgagaacccggcagccttcattaacagacgtgctgtattgcccagaagccatcgtgtcgctggtcggggtcctgcagaggctggctgcctgccgggagcacaagcgggctcctgaggtctacgtggcctttaccgtccgcaacccagagacatgccagctgttcaccaccgagctaggccgggatgggatcagatgggaagcagaagctcatcatgaccagaaactgtttccctatggagagcacttggagatggcaatgctgaacctcacactgtaggactcacacatgactccaaagggattgtgagaatcaagtcactctcgtgggaagaatttttatatgggaaagtggataaaactttcattggactggaatgtttggagattattaaattccaaatcaggaatcaaaactgccctctaataagacattagctgtctaggcgtgtgggtgccccctttctgccagcagttctggttctcaagaaaatcatcataaatcagacatgaaaattctggctccaaaaatagcattttctttctgcaaataaaaacgtgtgtatcaaggatgacgttcccccaacgtggacacactcggttcctcagaaagccaagcccgctgcagctgccacatccctggacacactcggttcctcacaaagccaagcccgctgcagctgccacatcccagggcttatggtgcagcaggcgcttttttcaagacaggaatgaaagtgttaggaacatggcagaaaggtgacacctggagaccaaatgcaggatgaggagtactgcagaggtcacagggaagtcacagaacagtaatacgctagcaggggcatggggcatgaagaacagaagacaggaagcatttcagagactccaaagaagaaatcagggccaaccacagcttcccgggtcattcaccaggtgacaccactgccgtcatttcagcttctggccactgggaggcgctgctcgaaaggctttgccctgagactccaagaagctgcgggaaggacagcaggggccctggggttttagcctctggcccaggagttatgtgtccataaccaaagggagcacagtctgcacccagctctcatcccatcagagctgctgagactcttgcaggtacttccagaactggtttagcttgcctgcaggatcagaaaagtttgagaaaagcatctgcaaaatgctaaagagcagagcttaactcattgcctgtccccaccccatcccaggtcaccacttggatgaccccaggtccccgacccaacaacaacccctcccaagtccctaactccctcacttggacttgagacccttcacaacccccctcacttggacttgagacccttcacaacccagcagcgctccacctccaacttgacatcatgctttctggaaacttccccgtatgtcccactttcccacacttggtgccctggagcaccttccggcctctacatgctgtacgttcccctgtgagcaccctcctctcggcctctggccaacacagtcccacccatctgtgggtaacaagggggtgtgggtgttcttttcagccttgctaaactgtctgaatcaaggatcacaaactacagcctgcaggccaaatccagcccacagcctgtgtttgtgaataaagctttgttggaacaaagccacacccctt

SEQ ID NO: 2339 - DNA, 2655 bp, Homo sapiens
tgttaatttcatctaaagaagtaactatacagaaacatccagattaatggttgaccaaaatctgggcactgtggctcagccaggctggcacataacattacccatcgcatgttagttggaagcttggcctttggaattaactcagcctggtcagccgttagcagccagcagtctctgttctgcccacacacctctgtggactgacccaggacacaggtgagcagcatccatgagaaactgtggtgcttctctcctatgggacagatggagccccgctcccttctgtgtggaaatggtccaggagcatcttgtgcgggtggtggggggcgagggcagggcctccgcatgagggagagcagcgagcggcagccactccttcgccgagccagcagggccatctcctgtctgcctcaaccactactggactcagcctttctcccccagcagtgacatcaaaatagcctatttataggacataacaaagatgatgccagctgttaataaaaatgtccgctaatcaggcagttcacttgctgcagttttttggggtcccaagggcccagcccaggctcctgtgcccttggccaccgtgggccagtccctggggtcttgtgggagcctccgcgggcctgggagtggcaggacccttagagggcgagagttcacatgagagcgtggggttctgactcgcgagggttcacgtgagagcgtggggttctgagtcgcgagggttcacgtgagagcgtggggttctgactccctcgtgtcatttcagccgcggcgagtcctttgcacatgttggcaacacacgcatccgcatcggcctccctgcccacaaagcgccacaacggtgaccagccggagcagccggagctgaagcggatcaagacagaagacggcgagggcatcgtcattgccctgagcgtggacacgccaccggcagccgtaagggaaaagggtgtccagaactagcgaccgggagagcttttctttaacgatatcaactctgtggtgccaaaaggagacgcggcctcccgccagcactcgggggtgcagggccctgtggttggacttcacctctcagcactgaaaacccaaaacccagctggccttaacactccttaaagacagaagtcacacttgaacaaaacccacacacaacaaaacctgatttgggagacggtgtctccactgagcacctgctgggctgagcttctacctacgagtgaaactctgtcctcccgcgaggaccaggcatcgctgtgtgaggacggcacggccagcgcctgctgtgagtgggtctcccaagactaggcctcaggacgcggggggagccatccccgccgccctcacaggacccaccaggcagcggagacatgtggaattagagtattttgaggtgtcctttctttacaaaataatggggtcttgggcatttcacatcactccatttctactgagactttcagaatcacacaggccctttccgtggatttcatttggggcaaagaaacaacgtagttttgtttttgttttcagcctatggaatgatttccttttgtctgtcttgttcaagttcagacgaagctactctggcatctgcacatttccgtgttacagcagctgcctgatgaattttatccacctccatttcagcatgtggctcgcgtggacaggtggacggacgctgtggccgcatggaaccttgagaacccagggacgagccagtgccgggaaggaactgccgggactcaccgagctgcacttaactgttctctttctggctattttttgttgtttgtttctttgtgttgactttgtccctggcaaaattttccactctgagtaaaacaagtctcctaagtattgtgtatgtttaaaacgacagaaccatttctacttcatttggaaaaagattcagtcttttatcacaggcccttttgaaactcagatcccaggtctctccgtggtatgtttgtatttggggtgtccctccggctctaggcggcctctgacccgctgtctactccccaccttcggtgagcggccgccatggtggagcagggtccgagccacgtcctgcagggcacatctggggcatttcctgttttgtggtaggaaatgtccctgacctttcagaaccgaacccaatcctgaggctgactcctctacggaaaatgaggacagtacgggggtgagggaatgagagtgggaggtccctgcacctcctcgcccggctcctcaggaagaaaaccgctggcccttcccgagtgtgccggccgagggccgagggccgtgcacatggggagagggcgtcagcctgatggctgagcttttaaatgtcatcatcataacattatttatttaaatgtagttattttggtatttaatttttttttagagaggaaaaaacctgtattttcctggtgggatgaaatagggatgaaatggctcagaatggtatatttaggcaattttaaaacatttattatttacataaagaccaaatatgatgaatctgttccgtgaattgtgtcggccctcagcatggggctggggcagcgtcactgcggtgacgcccattgaaaggtatgaaatgactgcacactagctggattatcactcagccgtttaagaaataaaagcaaaaccatc

SEQ ID NO: 2340 - DNA, 2442 bp, Homo sapiens
acttccgcctccagcctccgggccgaagctttggcctatggtgcggggaggtggtagtttcttccgcgagggtgcgggagggccccggggcgcccttgggaaccgggctggaggcagagacaggcccggaggaccaggcggacgtaaggatcaggcctctggacgcaactgcggagccggaacagaccaggagggcgcggttgggcgggtacagccaggaagtgctcgtcgcgagcgcggcccgcggttcggccacagcgagaagcccgcgggtgccgggagtgctcggtcttctctcgatctctgcagggagtcactggccccgttcctttttatctgtctgaacatcacgccgaacttttaacagttgattccactgcattttcaatgtggtattttttttttctgtaaatgttcatctatttttcgcttcaaatatgcgtttctgttacttttctaatgtaccgtaggagccaagaccacctatactacgttgcaaaatagcactgataccaggggttctcccaaggttcattcagaaatgtcacatgattccagtaacaatacgaaaaggttttttttttggaaccaggcatattgatcctggagttcacatggaggaacaaatgtctcataacgcagacgacgcggacaaacaaaagcgcaatgcccgacagatgcgaaaacagcctctgtcattaaaactgtgtgctactgacacatgaacaggaaacaaatggaatatccagacatcaacccagtaacatggaaatttggttcataaacataatttcagagcggtggaacaaacatgcagtttataatgaaaggtgctaagacaaatggttagccgtctgagaaatgatgaaattaattctggatctcacagggataaactccaaacggatcaggagtctaaatgtgaaaaacaaaacaaaaccacatgtgaagtgttcacgtgatttcgtggctgattaagaaacaagatgtgcccaggaggtggcggtggcgcacaagctttgacaggttggagggtgagggagtctcacgcaccatgagattacccacaggcttcgaattgggggtcactactcagaaaagagaaaaaaatgagcgtgggcggggggcgcgcagagaactcccagagaagaaggagatcagacagggggagggctgacgtgactagatcacgtttctcagcagcctgacaggtgtctgagtcacaaagctctgaagggcagcaacggcttgcagtctttagagccccaggatttatcttatctatggctagcagagattggacacaatttcacgaagtatacaaagcaaccacatgctaaatggttcaacactatgagtgtttgggatgtgttttatttattatttattaattttgatacggagtctccctctgtcgtccaggctggagtgcagtggcacgatcttggctcactgcaacctccgcctcccaggttccagctattctcctgcctcagcctcccaagtagctgggattacaggtgcccaccttgtaatttttagtagagatggagtttcaccatgttggccaggctggtctcaaacttctcacttcaggtgatccacccgcctcggcctcccaaagtggtgggattacagacgtgagccactgcagccaccgtgcctgcccttgggatatgtttttttttcttttaattttgttttgttttgtttttttgagacgaagtcttgctctgtcgaccaggctggagtgcaggggcacaatcttggctcaccgcaacctccgcctcccaggttcaagcgattctcctgcctcagcctccagagtagctgggattacaggcacgtgccaccaagcccagctaatttttgtatttttagtagagatggggtttcaccatgttagccaggatggtatctatctcttgacctcgtgatcctcctgcctcagcctcccagactgctgagattacaggcgtgagccaccgcacggatatgttttaagtaactgaatgtattaaaatttgactttggcaccagcaggctattgtgaataatgttgctttgagcatcgtgtgcaaaaatatcctggacccttgttctcagcacttttggatatatatgcaaaagtggaatggctgggtcacatgataattctgtctgatgttttgagaaaccactgtcctgttttccagagctgctgcaccattttgtattcccatgagcaggtgcacaaggttccaactttaccacatccagccaacagttacctcctatttaatggctaagagccatcaccaccggggtaatgtgatctcactgtggcttttgttttcatttccctaatgtttagttatgttgatcatcttttcatgttcttattggccatctgttatcttctttattataagtccttttctgaattaaattggttttgttgtt

SEQ ID NO: 2341 - DNA, 2260 bp, Homo sapiens
gttggcaggatcacagcaggtgtggaggggaggtcactgggaattccctggagactcagtcgttacccactcaactggaaggctgagcatggctttttcctctgatggttacccatgccaggccccacctctccatgtccaatgttctttctttatttgtttgtttgtttgtttgtttgtttagagacggagtctggctctgttgcccaggctggagtgcagtggcacgatctcagctcactacaacctccgcctcctgggtacaggcgattctcctgcctcagcctcctgagtagctgggattacgggtgcacgccaccatgcccggctgatttttgtatttttagtggagacagggtttcaccgtgttgcccaggctggtcccgaactcctgatctcaggtgatctgcccaactcagcctcccaaactgctgggattataggcgtgagccaccacgcccagtccatttccaattttccatccagtggtggcagaacaaacttggatgggccccagtgctctgctggaaccaggaccctcacccagctgcctccagctgggcctgcccacccctgctgacctcctacatgcagagaacagggcttctctgctcttcaggcctgaagctgtgatgtccacaggacctaggaaccacgcacaccccctgaagctggaacaccaggcatgggtgagtcctgggtggctggatcttgtcaagatgggtgaaagggcagcttctgcaagcaggacccatcctcagtggactggatcatcttcagcgttctcattctcagccgcattctctgggaacagggaaagaggttcctgtctgaatcttcagcatgggctatgcactggtggccccttcctgcttggccactgtgccaggtgagcctacaatgagatgaaatgatgacgtgggacaagtggctctctgcagccacctccagcaccaccctgcctgggaaggcaggggtcagaggggtgggtgtgaaggggttggagtgcacaggtagaggtggctggggtcttcactgtgttggggagggtctcatcgccttgagactctgcagcgtctcctcagaggccttgtcgggaagcagcacctccacagtgtagctgagcttcttggcatgcatccggctgtaggtgttgtcgaagcgcaggacatctgcagtgatggagaggtgatcagggagcacaaaccccgcacatctgcaggaagagccagccctgcatgggtgcatccctggaacccttgggaatgagctgcatccctggaacgtcctgcatccctggaacccttggaaatgagctgtccaggacagtgggtggggcctgagggccagcctgtgcccagccctaagcccattgctcgctgccatctccatggtggcttgcgctacatgaaggaatcatgatggtcatcagcatatagaacagcacacagccagggagcaggcggcctgggaacgggatctcgagctccacctgcagggaggagctgtggcccacggacacagtatgctcgtactgcgtcctcgcctagttgcggttgcacaggtagctcttgggcctctccatgaaccatggattccatcacacattatagcccctgaatcctcaaagcagccccatgtggaaggcaatgtcatcctcattttacagaggagaaaactgaggcttggagaggtgatatgatctttcagcggtcacagagcaagggaggggaggtactgggattcctttatccagatgtgcccaggtgtagagtggctgccatccctacctgagcacacagcccgggaacaggatctcgttctccacctgcagggaggagccgcggcccacggacctcgtgtgctcatactgcagcctcacctgctcgcacaggcagatggacacaaccagggggccacgtcgctcacctcccagaatcacaatcttcctgcgtgtctcctcactcatgaacgacttgaccaagttgaaggccacggggaacagttttggggctgaaacacatgtaaatctcttgagaagctggaccagaaaggacgtggggatacagagccacagccaagagcaggtgctggacaggaggtggacagatatggattctgccactctctgctgtgtgaccttcagcaagttacccaccctctccaagtcttagtgcagttaactggaaaatgaaggtgaaataatgtatgtataacacctggcacagttcctggctttcaataaatggttgtctcaggc

SEQ ID NO: 2342 - DNA, 2420 bp, Homo sapiens
atgttactgtgtcttattggttcaatgatgatttctctggcatattagacttttattttttcccccatggaagcacttgaggaaataaatagtacactggctgttttctgccagcaactgtggtgatttttctccctgtcctttgagaattgctagtctgcttctgagccattgtcatatccagcagggagcagcttggttcaagaaggaccatagaggctgctcagcatctcctccctccctcccagcttgccagggatttgatgagacaggaaactgcccagcaaaccagggactgcccatgtaaactatttaagaaaaagttcaacccaggtcttgtatcctgtgatttagcagttgaatgaatacagaattcatcaaaataatattaaccttgtacttgcacacttggatatatttgggagtaattttaggagatttctggctgacttttattatcagggatatgggtttagtaaagcttttatctttagaaaaatgtttgtatgtattataagatgctacttttaagacaatattgaaaaaaactttggttattatttaacaaaagtggtatgacttgatgcttctctatttaaaggcaaggaaggattggtatatgattgcctgtaataaataaattgcgtgattattggagtacattggggtaaaagtaaagaacagaggagtattgaggagcttgaaagggaacattcaaactaaagccaagcctgaagataacttgaatcagttgtaaaagtgtgttggcaatgtccgaaattgaatgaaaaacatctggcttataagaaatgttaaagaactaccatcttaagtaaaattggtgtttttgttatttttaaggtaaatgccaatgcaaaaggtatgtttttctacttcacattggttttcttttcctgtttacatctgcacttgttttttgctgagagccagaggaaaagataattagactttgtctcttccacccatgaaatcccccagtacccagggcttcttctgaactactgccgatgtgatgtcactttgtatctggaaaatcactttggggtccatttactgttattttgttgcctacaaaaacagccaggtgaaagctaaatcttgtgtgagagtttgcagaggtttttctatacaataaagtagtatagcacactagccaaatccatccaaaaggaccttttttttaggaagtagacttgaattcacaaaacagtcttgacatgggtagctggtgaaaaaccctctggagagcaagtggagccagtccccattggctgacagtgccacctggagctggtctctggggtgttcggttgtttattcctgaggaagactagctgctgctgctgctgctgctgcaaactgtactgtacacatcatggctgctggacacgaaggaggaggtgagagaagtttcatgctaccgaaatagagggtgttggtccactgcccctggcctgagagccagggtttaaacctgcctcagtagagtctagtttgaaatgacaccaaaattcctcagcccctactcagcaattggttttggtttccaaatgacttctgcatttgtaaagataacagagtggtggggtcaaagtttatcttgtgtttagatctcttcaagactgcttaagcaaaaacaaaaatcccttggaacctatcgtttgagcctgtaaagttgttttagcagttgtcataaatgcatatgttgtgaaatcagaacactgtcgagtttatactcatttagctgcaatgtgggacaatgaaaaatgctttacaggcctggagtatcattacttatggtatctcctgctttaaaatctcaagcgatatctatctggttaaattccattttaggagattgagatgcagaacgttaatgttcattacctcctcctaccccaagagaaatggattcagacatgtcttgtctcaacaagaaattgatttttttttaaactatctcattctgttgccaaatatcacagaagtaatgaggagtttagttacatttggctgttgtgctctgaaagagccaggtttggaatttgtgggggtgatctaggaagaaggttccaaagaagcagaggcatttgtcaagttacctaccctatatccagcatcctcctcatgagcttcagtagctgctctttgcccacgcttgtatcctacgtttgctatttgggcaaaccattacttcagttatttaacttccctttttttttaacttcacctttgactatgaacaagtaacggtaacattccttttgtgtattcaataatgcagttagtttacctttttcagaatattttgaacaaagatctttgtctctttctgctggaatgcgcacacagtgaacgtttgttagaactacacacaataaagacactgttttcctttt

SEQ ID NO: 2343 - DNA, 2329 bp, Homo sapiens
aggtttggggcggggccagccccaaggacccggcctgggtgcaggcagcccagcgcccccaccccagccccggctcacctgttccggggtcgccccgcagatcttcaacttgatgaagttcgacagctatgcgcgcttcgtcaagtccccgctgtaccgcgagtgcctgctagccgaagccgagggacgccctctgcgggaacctggctcctcgcgcctcggcagccctgacgccacgaggaaggtgcgtgggactgggcgagggactgggcgaggcagggggtcctgcggaccgcgtgcaagaggggacgcctccgggtgcagatctgcgagtctgtgcccacggtctgcatgcgggctggggcccagcccggtgccagcgcctcccctgtacccacagaagccgaagctgaagcccgggaagtcgctgccgctgggtgtggaggagttggggcagctgccacccgttgagggtcctgggggccgccctctccgcaagtccttccgccggggtgagggcaggagcgagcaacagagatgtggggaaggcgggagtttggttaaatttggggagtgcccccttcctcctacgtggcccacagtctgtaagtctgtgaaaattgaaacccaggtcccagtgaccaccacactcccctgggtggttcgggtcttgggctagacctcagacgtttggaaatctccaacggtggtgtcgctcccagggatttacacctgggcccctgcaggatggctccaaacaaggcccaccagtggggaacaggcttccgcagaggatgggtgagggcggggggctgttcgcgttcatcgctccctcttcactagagctgggcgggactgcaaacgccgccttgcgccgagagtctcagggctccctcaactcctccgccagcctggaccttggcttcctagccttcgtcagcagcaaatctgagagccaccggaagagccttgggagcacggagggtgaaagtgaaagccggccagggaagtactgctgtgtgtacctgcccgatggcacagcctccttggccctggccagacctggcctcaccatccgagacatgctggcagggatctgtgagaaacgaggcctctctctacctgacatcaaggtctacctggtgggcaatgaacagaaggccctggtcctggatcaggactgcaccgtgctggcggatcaggaagtgcggctggaaaacaggatcaccttcgagctggagctgacggcgctggagcgcgtggtacgaatctcagccaagcccaccaagcggctgcaggaggcgctgcagcccattctggagaagcacggcttgagcccgctagaggtggtgctgcaccggccaggcgagaaacagcctctggatctggggaagctagtgagctcggtggcggcccagagactggttttggacactcttccaggtgtgaagatctccaaagcccgtgacaaatctccctgccgcagccagggctgcccacctagaactcaggataaggccacccatccccctccagcgtcccccagttctctggtgaaggtgcccagtagtgccactggaaagcggcagacctgtgacatcgaaggcctggtggagctgctgaaccgggtgcagagcagcggggcccacgaccagaggggccttctgaggaaagaggacctggtacttccagaatttctgcagctgcccgcccaagggcccagctccgaggagaccccaccacagaccaaatcagcagcccagcccatcgggggatccttgaactccaccaccgactcagccctctgacagctacccaacagtccaggacagctgcatggcacccggcgggccgagcatgccatgggtccgctctgcatgccctgtctgtgccatgagtgtccctggccccttcctgccatgggcaggcccgcaggaagagccggtaggggtggaaaggggactcagatgagacacaccccacagctgccaccgccttgtccctcaacaagctcacccccaatcccttgcagccaggccacaatgggggaggtgagtccagccccttggaacaggcttgcccaacatggagggatggcgttggcagtgccagcctccccagcctgtgccaagcttcaacaggggcaagaggaggggccggcccctcctcaggaagctggtatgagtaaggccttgagggtgcaggcaggcagccctgtaccccacccacatagactatactgtacatacagattttgcagtaggcttggggcagctgggtttgtccttgatgtatgatactgttattataataattattattattctgc

SEQ ID NO: 2344 - DNA, 2323 bp, Homo sapiens
agctagagtcggcgccacgagggggccgagcagggtgcggcggcggcggggcgctccggggaggtgcgtactgggctccttcccttcctccgggcttccaggaatcacctggggactctcgcgtcccgggtcctggggggtcgccggccgcagggtccggccccagccggggtccccgcgcccaggcgagcgggggccgggccgggctgggctttccgcgtgaacccgcccctcgcccagggcgccgatggtcaggtggttgcctgcgcgccgccgactcgccaccgctccactgggccggcacccagcctctccttggcgtggcctcttcggttgtccagcccttctcccagccctggtccctcagaaggagggtaactcccttccagatgttacggtccgcctgcgtctctcagcacgccggtggcatttgggttgaccgcggaggcccccagtgccagagggtgttcacgttctgccgtgggctcagcccaaactttggacgctcagagacccaacgggagcgctggataaggtgttgacccccttcccctcccccttcccggccagttacccactcctggactttgatctctctccaccaggccaggacagctgatggttgtggcagaaacatctcaaggtagctggtccgcccccacttccccatctacctcttgtcctccccccaacaccaccaccaccctggctcccctccctcatgaccgcctggatcctcctgcctgtcagcctgtcagcgttctccatcactggcatatggactgtgtatgccatggctgtgatgaaccaccatgtatgccctgtggagaactggtatgaaggactctgcagacaaccttgctctaaagcttccttcatctctgtcccctcttgggcctgaggctgccacgagccagactgcaaccctgagcctcactgctcttctctgaaattggtccccaggcatggcttcttgccacctacccacttcccactatccctttgcccctttggttactgcttcaggcgggcactggggagtgggatcttctgtccctgtaggggaggtctgggagagagtcctctttgaggcctgaggctataggccaagggcctgggggcagtcccttcccccagtctactccctgtcctgcctgccaggtcctacaacgagtcctgccctcctgaccctgctgagcaagggggtcccaagacctgctgcaccctggacgatgtccccctcatcagtggccctgatctgcctcctgcgctacgggcagctcctggagcagagtcggcactcttgggttaacaccacggcactcatcacaggctgcaccaacgctgcgggcctcttggtggttggcaactttcaggtggatcatgccaggtctctgcactacgttggagctggcgtggccttccctgcggggctgctctttgtttgcctgcactgtgctctctcctaccaaggggccactgccccgctggacctggctgtggcctatctgcgaagtgtgctggctgtcatcgcctttatcaccctggtcctcagtggagtcttctttgtccatgagagttctcagctgcaacatggggcagccctgtgtgagtgggtgtgtgtcatcgatatcctcattttctatggcaccttcagctacgagtttggggcagtctcctcagacacactggtggctgcactgcagcctacccctggccgggcctgcaagtcctccgggagcagcagcacctccacccacctcaactgtgcccccgagagcatcgctatgatctaaggtctggggagggtggctggcccggcctccacagcaccccaccccatatcttctttccatttattttgtaccaaaaacaattttgagaaagtattctgttgggatctgggcttcctcacttctggagaagtggccatcccatgcccacctgtgccatggaggagtgggccctgccagctgccacagctgcatgacctgcttccccaccccacggtgtcgttttgtttttaaaggtcacctgtcctcactcacccagccagcccttcaggtgccttctactcccagtgccaaagccagaccactggggtttcctgctgcaggaattgggggctgggaacagcagaggggatagaagtctggtggaggtggagtgggcacgccttagcctacggaaaggcccatttctgggcccactgagctgcactgggattcttcactctgcccctcacttcctttagggcaaataacacagcagaaccacgtgggtattttagtacttttttttatattaaaagaattctaatttg

SEQ ID NO: 2345 - DNA, 1790 bp, Homo sapiens
aggtctgggagacgagcccagcactggaagtcgtcggtgtttccattcggtgatcatcactgaacacagaggactcaccatggagtttgggctgagctgggttttcctcgttgttcttttaagaggtgtccagagtcaggaggaactcctggagtctgggggcggcgtggtccagcctgggaggtctctgagaatttcctgtttagcctctggattcaccttcagtagttatggcatgcactgggtccgccaggctccaggcaagggcctggagtgggtggcatttatatcgtcagatctcagagacaagtatcctgcagactctgtgaagggccgattcttcatctccagagacaattcgaagaacattttgactttactaatgaccggactgagacctgaggacacggctatatattactgtgcgagagagtttggattctgtggtggtcgtgtttgtgggtccacctaccatcacaccatggacgtctggggccaggggaccacggtcatcgtctcgtcagcttccaccaagggcccatcggtcttccccctggcgccctgctccaggagcacctctgggggcacagcggccctgggctgcctggtcaaggactacttccccgaaccggtgacggtgtcgtggaactcaggcgccctgaccagcggcgtgcacaccttcccggctgtcctacagtcctcaggactctactccctcagcagcgtggtgaccgtgccctccagcagcttgggcacccagacctacacctgcaacgtgaatcacaagcccagcaacaccaaggtggacaagagagttgagctcaaaaccccacttggtgacacaactcacacatgcccacgctgcccagagcccaaatcttgtgacacacctcccccgtgcccacggtgcccagagcccaaatcttgtgacacacctcccccatgcccacggtgcccagagcccaaatcttgtgacacacctcccccatgcccacggtgcccagcacctgaactcctgggaggaccgtcagtcttcctcttccccccaaaacccaaggatacccttatgatttcccggacccctgaggtcacgtgcgtggtggtggacgtgagccacgaagaccccgaggtccagttcaagtggtacgtggacggcgtggaggtgcataatgccaagacaaagccgcgggaggagcagttcaacagcacgttccgtgtggtcagcgtcctcaccgtcctgcaccaggactggctgaacggcaaggagtacaagtgcaaggtctccaacaaagccctcccagcccccatcgagaaaaccatctccaaaaccaaaggacagccccgagaaccacaggtgtacaccctgcccccatcccgggaggagatgaccaagaaccaggtcagcctgacctgcctggtcaaaggcttccaccccagcgacatcgccgtggagtgggagagcagcgggcagccggagaacaactacaacaccacgcctcccatgctggactccgacggctccttcttcctctacagcaagctcaccgtggacaagagcaggtggcagcaggggaacatcttcccatgctccgtgatgcatgaggctctgcacaaccgcttcacgcagaagagcctctccctgtctccgggtaaatgagtgcgacggccggcaagcccccgctccccgggctctcggggtcgcgcgaggatgcttggcacgtaccccgtgtacatacttcccgggcacccagcatggaaataaagcacccagcgctgccctgggcccctgc

SEQ ID NO: 2346 - DNA, 2343 bp, Homo sapiens
ttgtttcaaaccctcatcatcttcctgcatatatcctacagatgcataaactcagtggttttcaagtcatctgttatgggagtttttggtaaaaggtgccctgttcccactgcagtgatggtagccctgttttaatctttaatagaataagcgtttgtggatttcactggtctccttaccactcttcacttctcctgccttccatctggctgcctgacattttgaaaacaaagctaatcatatggcttttttcctgctgaaaccttccttggtcctcatcatgtagggtggtatttgtaaactcaaaacgcctgcagggactagaaaggtgagttaaatggatgaagtgaactggatgcaagagcagtgggagaagggagaagtgctgtggcaaactgtcccatctaaaagggacgcctgcctcttgtatccacgtgggaatgtgggcccactttgtcatagtgcccagttttttaaaaagaagccagaaattcagattgttatgagaaatgttctgattgaatattgactttagtcgagtttttaaaatgcagaccaacattgtatgtacttgacctacttggaatttctggaatgtgctattttgtcttgtgattctctgtaaatgatattccctgtttttttttttttttttttttcttttttcctttgagatggagtctctgtcgcccaggctggagtacagtggcatgatctcagctcactgcaacctccgtctcccaggttcaagtgattctcctgcctcagcctcccgagtagctgggattataggcatgtaccaccatgcctggctaatttttgtatttttagtagagatggggtttcaccatgttggccaggctggtcttgaactcctcacctcaagtgatccacccacctcgccctcccaaagtgttagtattataggcgtgagccactgcactcagcctgatgttccctcttttataagtgccattccttcttcctacctcacaacctagcaaaattggattcttcaaaacgccaggttggcctttcttgactccaaaagaggtgactcttgtagcattcttacaggcctaacatagcacttactttatgttgcaatgctgtgtgcaatgctgtgtttttttactcactagctctgagcaaaacattatttattcttggtaattgtaacacttggtagtgaagacatattttttgccatataatggattatactttgtatttgaatccatgtgaatcagtagcatattggtcttcattgtttttcctccttctccgacgtttttttgagacagggtctcactctgttgcccaggctggagtgcagggcacaattacagctccctgcagccttgatttctcaggctcaagccatcctcttgcctcagcttccctagtagccgggactataggtgcatgccaccatactcagctaatctttttaggtttttagtagagacaaggtctcactatgttgcccaggctggtcttgaactcctaagctcaagcagtcctcccgccttggcctctgaatgtgctgggattacaggcatgagccactatgcctaaccatattttttccaatattaaaaaatctttttttccccctaaggaatgtgttatataaggtcaacatgtttttagtgcttcagtttgacttgtctacatctaaagttaactctttaaggcttacatttatgattataattctttccatcgagggatttagtctccattattgtcatgtttcttgatttttttcattatacttggttcttctttttgtctaggttttatatgtaccttaattaattctttcttggctgttttatatctatgttgctgtcagcatgggaatctctattattagaaagctattaacttttaaaatatgtatcttttggtgattttctttgttctaacagttttagatggcctgtttgctctttctaaatataaaatcataggtatttctattttgtttttgtgtttcataaaattgtaataagtttttttgatattttttcattacatatgaagttaattgttggttttaaacaaatgttctttgttaggataacagaaataacatcttctattcttgtttgttggaagctaaaagcttgataaaaggaattggtgtcttttgatacaatcaaatttttatcacttaaattgcctaatatgattataataagggtttttgtaatattaaaacatccttaaattcctgagataaaactctacctggttatagtatatgttcttttaatgtattatctttcctatttgctgtacatctatacattcataaataaaattcatttatatttt

SEQ ID NO: 2347 - DNA, 2826 bp, Homo sapiens
tagaaaaacaactttatcaagacatgttagagagaaatagttttgtgtcaatgtaccacattaaaggacaggaagaaaagccaaatggtattattataatagtttgcataaatattatttaattatttaagatattcagtaaagcaggtgaatgctagtcagggtaaaagtaaacaatgcagaagcttttatggaatgatatttttgatacatcatgaggtaaagtacaacataagtaaaagaaattcagtatttactcacagttatttgattataatataaaagtatgcatctagactctgcaaaagagagctgtattattttctgtgctaatgaggtatttaagacttttatccattctcttgaatgtatgccattattctaggaaattttttatgactttcattcatgctctgtattttaaatgttctcaaggccaaccccagatgaattaatgaaggacaaagtattcagtgaggtatcacctttatataccccctttaccaaacctgccagtctgttttcatcttctctgagatgtgctgatttaactctgcctgaggatatcagtcagttgtgtaaagatataaataatgattacctggcagaaagatctattgaagaagtgtattacctttggtgtttggctggaggtgacttggagaaagagcttgtcaacaaggaaatcattcgatccaaaccacctatctgcacactccccaattttctctttgaggatggtgaaagctttggacaaggtcgagatagaagctcgcttttagatgataccactgtgacattgtcgttatgccagctaagaaatagattgaaagatgttggtggagaagcattttacccattacttgaagatgaccagtctaatttacctcattcaaacagcaataatgagttgtctgcagctgccacgctccctttaatcatcagagagaaggatacagagtaccaactaaatagaattattctcttcgacaggctgctaaaggcttatccatataaaaaaaaccaaatctggaaagaagcaagagttgacattcctcctcttatgagaggtttaacctgggctgctcttctgggagttgagggagctattcatgccaagtacgatgcaattgataaagacactccaattcctacagatagacaaattgaagtggatattcctcgctgtcatcagtacgatgaactgttatcatcaccagaaggtcatgcaaaatttaggcgtgtattaaaagcctgggtagtgtctcatcctgatcttgtgtattggcaaggtcttgactcactttgtgctccattcctatatctaaacttcaataatgaagccttggcttatgcatgtatgtctgcttttattcccaaatacctgtataacttcttcttaaaagacaactcacatgtaatacaagagtatctgactgtcttctctcagatgattgcatttcatgatccagagctgagtaatcatctcaatgagattggtttcattccagatctctatgccatcccttggtttcttaccatgtttactcatgtatttccactacacaaaattttccacctctgggataccttactacttgggaattcctctttcccattctgtattggagtagcaattcttcagcagctgcgggaccggcttttggctaatggctttaatgagtgtattcttctcttctccgatttaccagaaattgacattgaacgctgtgtgagagaatctatcaacctgttttgttggactcctaaaagtgctacttacagacagcatgctcaacctccaaagccatcttctgacagcagtggaggcagaagttcggcaccttatttctctgctgagtgtccagatcctccaaagacagatctgtcaagagaatccatcccattaaatgacctgaagtcagaagtatcaccacggatttcagcagaggacctgattgacttgtgtgagctcacagtgacaggccacttcaaaacacccagcaagaaaacaaagtccagtaaaccaaagctcctggtggttgacatccggaatagtgaagactttattcgtggtcacatttcaggaagcatcaacattccattcagtgctgccttcactgcagaaggggagcttacccagggcccttacactgctatgctccagaacttcaaagggaaggtcattgtcatcgtggggcatgtggcaaaacacacagctgagtttgcagctcaccttgtgaagatgaaatatccaagaatctgtattctagatggtggcattaataaaataaagccaacaggcctcctcaccatcccatctcctcaaatatgaagaaccaagagtgtgactgccaaaacttagtgtggcatcagcaccaacagcacagttcttcatatccacgccactctcagacaaaactagatgtccagattgttgcatttccgtaaagtttgtcacgagacattttttaaaatctcataacccacatgttcagttatccatgcaagaaacttgactctacatgtattgctgaaagaattttcttaacagtgaaatctgatcatatatttttaccacactgccacataaagcccaagaaattcagctgacaagacagatttagcattatcaagaaatcccatttgccctgaaaaagctgtcctccattgtactgaacagacagtcctgtcgattgtgttatttagaaacatacactgaatgtgggctgaaatcatcatctttccataatgaaaactgagaaactattcacaatgcattccttataaataaatgctacatttagtaactcatttcacccaaac

SEQ ID NO: 2348 - DNA, 2081 bp, Homo sapiens
gctggggtctcaggaggcagcgctctcgggacgtctccaccatggcctgggctctgctattcctcaccctcctcactcagggcacagggtcctgggcccagtctgccctgactcagcctgcctccgtgtctgggtctcctgggcagtcgatcaccgtctcctgcactggacccagcggtgcctttggttcttctgactctgtctcctggtatcaacaacacccaggcaaagcccccaagctcatcatttatgatgtcagtcgtcggccctcgggtgtttctagtcgcttctctggctccaggtccggcaatacggcctccctcaccatctctgggctccaggctgaggacgagtctactttctactgcaactcatatacaaccagtaagtctgtgatctttggcggagggaccaaggtgaccgtcctaggtgagtctcttctccccctctccttcccctctcctgagacaatgtctgctacttttctgctttttttctcttgtctcgacttctcatcaccccttttccctgcatcgtcgccctgaggcaggacctctgcccttcctcttccgacccgtgccacctttgcccttcatttacgtggttcatttttgtgggcttttgggaacagggcatctgagggatgctcctcctgggagactatggagacaccccctgccctcggggctgctcctcgggaatcgcagacgtgtgaccagagccaaatttcagacccagagtcatatatgtggggcttcaaaacccttgcccttgacttacgtggtccctttttggggctttgggaacaaagggtctgcgggaaacaacgcctgggagactttagagtcacccgctgccctcggggcagatgctcgggaatcgcagacctgggaccagagtcagtatcctgacgcagagtcatacatgaggggctgccctggacgtctgggggctgcccggggctgcgccctgagtgagcctgagactcagggaaccccgtcaggggggagaggggagaagcggactttggacaccaggaagagacgggaaacattacaaagtgcgtgggtgtgacgaaagggcggactcctgggtctctccagaacataagccagtgcgtgagagccccactactctgaccaggttgtcgggacatggggtggacgccggtgaagactccacagaatgagggagagcccaggacagcaggcaggctctccgatccccccggcccttgccccatacgcgggctccagagtcctcagaaccgaggagccaggccagaagagtcaccccagagttcgctgtgcaggagagacacagagctctctttgtccgtcaggatggcaggaggggacagggtcagggcgctgagggtcagatgtcggtgttgggggccaaggccccgagagatctcaggacaggtggtcaggtgtctaaggttaagcagctccccgtgcagatcaggacagagtggaaaacaccctgacccctctgcctggcatcgaccttcagacacagagcccctgaacaagggcaccccaacacctaatcatattctgcggtcaggggctccccaggtggacaccaggactctgaccccctgcccctcatccaccccgcaggtcagcccaaggctgccccctcggtcactctgttcccaccctcctctgaggagcttcaagccaacaaggccacactggtgtgcctcataagtgacttctacccgggagccgtgacagtggcctggaaggcagatagcagccccgtcaaggcgagagtggagaccaccacaccctccaaacaaagcagcaataagtacgcggccagcagctatctgagcctgacgcctgagcagtggaagtcccacagaagctacagctgccaggtcacgcatgaagggagcaccgtggagaagacagtggcccctacagaatgttcataggttctaaaccctcaccccccccacgggagactagagctgcaggatcccaggggaggggtctctcctcccaccccaaggcatcaagcccttctccctgcactcaataaaccctcaataaatattctcattgtcaatc

SEQ ID NO: 2349 - DNA, 2532 bp, Homo sapiens
gtttcatacccagactccctgggttttatgcgccctacttagagaccactggcctctcagttcagacttgagctggtgcacaagccttccttagtctgttcccagccttgtacttcactgcatccttctgagtcctctgcctcaagctgttccacttactggcatctcagtaatgcctttcccaccccgtgtgttacactgttctcattcccctccctccgcacacttgggtaatctttcctgcccctcttcacctgtccaaaccccatctgtttttcaaggtccagctcatagcttaccatttctgaaaagcatatgcctgcaccatcctagcccacagagatctctgcagtttctaaatatctgatacttgcagctataagctttgatagttaattaagtattacctcttcataaaaactttattgtggtaaaaaacgttaaacataaaaccttaaccatttttaagtgtatggttcagtggtaattaaatgcattcataacttacaaccatcaccaacagtccatctccagaactctctgcattttgtaaaactgaaacgctgaacccattaaacaacaataacttcgttgcctagcaactatttttttttcagcatctgccacaaagccttgagtataaactttgttttgaatcactgctttctctaaggagtcacctgcttccttgccccgttaggctgcccttatgtattgtgcttcccttcatcgacttaacagaggtgcctacagagtcccagcccctgtcactgtcattcaccttgaatgcatagcagttgggagacacctcacagaatgtaaggaatgtgatgccgcaaaggcgcattcatttcctgttgctgcgatcatattaaccacaaacttgatggtttaagatgatccaaatgtattatcttacgcttctcgaggtcagaaatctagtgggttcacagggctgtgttcctttagaaaccctaggggaatccttttccagtattcccaagaatgcatctcctggcttctagcggctgcccgtagtccttggcttgtggctctccgtttgtgcttcaaagcgatcagctcctctcccctctgcttccgttccttcatcttctgcatctctgacccatctgcctccctcttctcaggaccctgggatgacattggacccacccagataattcagagatccctaatttaatcacatctgtagagtctcttttaccatatatggtaacatcttcccagattgcacggaggctagcatatagacagctctggcgtatgttattcggccagccacaaaaggcacactctgacagcacaaggggtggaactgggatctgtggcacagaccttcacacagagccgtggactgtggaatgtctgattttaatgctttggggttaggcacggggaggagtggacaggaagtctcatctggccgttactctcagttctcttatttgaggtcaatttttagatgccagtggcaacttgagtgccactgtcattctagattatgtcaagtatagatctttgatatttgaggactcctgtcttactagagtttgtgtctatgttcagggcactttggagaccccaccattccatgaggtggtcagagcgatggagagcatcagttgctttactttttacctttttcactttctgcagaaacagagagattatatccttgaaggagagccagggaaggtgtctaatcttcaatacttgcatagctacctgacttacatcaagctatcaacggcaatcaagcgtaatgagaacatggccaaaggtctgcagagggctctgctgcagcagcagccagaggatgacagcaagcgctcaccccggccccaggacctgatccgactctatgacatcatcttacagaatctggtggaattgctccagcttcctggtttagaggaagacaaagccttccagaaagagataggcctcaagactctggtgttcaaagcttacaggtaacgtcccatgggatgggcagttttcctccgcctcccaggttctataagcattgggagcatgacccagcccacagcagatgggaccgttggccttgagtgtatggttaccttgcctgtgatcagaggaaggtcagcccagcatgttcaaggggagtttctaaaggctgtggtcagtagtggccagtgatgatgtctgccttttggccaggtcggaggagtggagcacacacgttaaacttggcttcctcgctgggcgcgggggctcacacttgtcatcccagaactttgggaggctgaggcaggtggatcacctgaggtcgggagttcgagaccagcctgaccaacatggagaaactccgtctctattaaaaatacaaaattagccaggcatggtggtgcatgcctgtaaacccagctccttgggagcctgaggcaggagaatcgcttgaacccgggaggctcaccgcaacttggcggtgagccaagatcgcaccattgcactccagcctgggagacaagagcgaaactccatctc

SEQ ID NO: 2350 - DNA, 2033 bp, Homo sapiens
aatctagttattcattaaacgggcacagtaatccctaaattggctcaggttattgtataataaacaacaatactttctccttcaggagcttgagaagtgatcttgtatttttaaggtgcctaactaacttttcatgggaaactgagtccatgtactgggaagaaagctttttggggaaaatgattagaaaaccaaatgggtctctttatgactgaagtgatgaaccagcaggtgagagtaggtatagatggtacagaggacggaattactgggtattttaatcaggcccacttagtatcacaatttattattctattctatttttattattattttttgagatggagtttcgctcttgtcatccaggctggagtgcagtggcgctatctcagctcactgcaacctccgcctcccgggttcaagagattctcctgcctcagcctcccaagtagctgggattacaggcatgcgccatcacacctggataatttttttgcatttttagtagagatgaggtttctccatgttggtcaggctggtctcgaactcccgatctcaggtgatccgcccgctttggcctctcaaagtgctgggattgcaggtgtgagccatcgcgcctggccagtgtcaggatttattctgtgggaggggaggaggacaaagaaaaatactgagctatgtttgaagctcctgccctctaagagccttagagcagctgacttaaatgtgttcctttgataaactgtagatggttgttgtaactcttctgcaaactgtttatttttaaaaacaatttgatgagattttacttatgcccattgtttgagtacagcatttaccaaagaacaattttggccagatcccatgcagtagaatgcccttggccaaaattttcttgtactataagcaaagaagcagtttggtttttcacttaggcaagactgcctatcagactgagttattgtgacagagccgctgactctctccctttccccattatcaaaatctggcttttctaagcagcgcatgtaaaaagcttggcaaggaggacccttgtcctcctacatattattctttggctcttcttggtaccaagaatacatacaaataatgctggctgtgtactgaatgttgaggtgtgcactgttgaggatattcatcctctaatataacatctagtatttctcacaccttccgtctgctgagcattggtctatcttacttatactacttctaatcctcgtgaactctgcaaaactagtggctttacatctatgagaaaagaaaagaacttttatcggaagaaggtgagtccttttaaagtatcaggcctggaaagacattaaatgagacagcgaacacatcctgctaccctctttgagctatgtattcattgacttttttttttttttttttttttttttgaggcagagttttgctttgtcaccaggctggagtgtagtggtgcaatcttggctcactgcaacctctgcctccggggttcaagtgattctcatgccacagcctcctgagtagctgggattacaggcgcctgccaccttgcctggctagttttggtatttttatttttatttatttattttaagacagggtctcactctgtcacccaggctggagtacagtggcgcgatcttggctcactgcaacctctgcctcccgggttccagcgattctcctgcctcaacctctccagtagctgggattacaggcgccttggcaccacagccagttaattttttgtatttttagtagaaacggggtttcagcatgttggccaggctggtctcgaactcccaacctcaggtaatccgcctgctttggcctcccaaagtgctgggattacgagtgtgagccattgtgccccgcctatgtattcatttcttaaaattggttgctggctaggtgtggtggtacatgcctgtcctataatcacagcactttggaaggccggtgctggaggatctattgaggccaggagtttaagaccagcctgggtgagatcacatctctac

SEQ ID NO: 2351 - DNA, 2512 bp, Homo sapiens
cgggctgtagggatccggttggggggttccaggtcccacagaaggtgagttgggtgacccatgagtatccctgaactgagtgaagagtaaatgatgcataggaagtttaggtaaggcaggagaaagtgttccaggtagagggaacagcatatgcagaagccaggaaggaggtgagatcatagcgtatgtttggaaacagaaagaagtaataggcctgagtggatgggagagaggggaacgctggagaagaggacttgggcttggggggcatgaggaggtcaccatttgtactacacccagtacagatgtccactgaggggcccattgccactcccctccccaggtccctgaagacttcatctcccgagagctgtttgacacagtccaagtgtacatcatcaccaagccagagctgcagaacaagcttatcactgtgtgagaccctagctcggggtgagcggtgggtggcaggggttgtcccaggaggaggaagggacaggcttgggggcctgactgtgttccaattatccagcacagctatggaaaagaagctgatcggctgtcctgtgtgcatcgaacacaagaagtacagccgcaatgctctcctcttcaacctgggcttcgtgtgtgatgcccaggccaagacctgcgccctcgagcccattgttaaaaagctggctggctatctgaccacactagaggtctgcaatgagatgggcttgggtttaccgacaggcagagttggggaaggtgttcccatgtctccaaagtcccccaaacctgggaccctgcaaaccagctcaggactcagggcagccaaccagccaggggtcctgggatgtgcccaccatgctttccatgctctgtctagctagagagcagcttcgtgtccatggaggagagcaagcagaagttggtgcccatcatgaccatcttgctggaggagctaaatgcctcaggccggtgcactctgcccattggtatggccagcctctgcaaggacagcagaggggtagaggagagatgggaaagtgaacccagctagtcagggagaagggcaagactcatgaacacattggtgggcaggaaatagccatgggctgaggtgcccatgtccagggtccaatgcatgatggagctgggactgggggtagggggaaagcagagctctccagctctgccccttgggcaattccttcccctttgtgggcctccgtttctcactccataaaaagagaaagattagccctacccagaggcacctgcttgccccaagggatgctgggaggcctggatggtaattgaggacctcttggaagaagtggcactgaggatatggatggggccccctgcagatgagtccaacaccatccacttgaaggtgattgagcagcggccagaccctccggtggcccaggagtatgatgtacctgtctttaccaaagacaaggaggatttcttcaactcacagtgggacctcactacacaacaaatcctgccctacattgatgggttccgccacatccagaagatttcagcagaggcagatgtggagctcaacctggtgcgcattgctatccagaacctgctgtgagtgggcctacagtcatacctgggacaaggtcaccagccagggaagacctcaggggccctgggtgtgagggttgggaaggcatggtcctcagaagctgagcacagctctctctctcaggtactacggcgttgtgacactggtgtccatcctccaggtagtactccaatgtatactgcccaacgcccaaggtccaggacctggtagatgacaagtccctgcaagaggcatgtctatcctacgtgaccaagcaagggcacaagagggccagtctccgggatgtgttccagctatactgcagcctgagccctggcactaccgtgcgagacctcattggccgccacccccagcagctgcagcatgttgatgaacggtcagaggagaatttgctggggcatttgggagttacctgagggaagctagaccctttatgtctctcaggagccctggatcatggggcactgccaatccaagcaggcttcctggagatgatgggctacagagacaaaattgaagggagactacaggaaagggttggcctgcctgaaagaaggcctggccagggcgtcaccccgtcctctgatcctcaccctaggaagctgatccagttcgggcttatgaagaacctcatcaggcgactacagaagtatcctgtgcgggtgactcgggaagagcagagccaccctgcccggctttatacaggctgccacagctatgacgagatctgctgcaagacaggcatgagctaccatgagctggatgagcggcttgaaaatgaccccaacatcatcatctgctggaagtgaggctggtagtgactggatggacacattgctgtgggtagtccctcctactaggaggcttgtcatactgtctagaggttgactcttagttctgtaaataaagacatccatttcaaac

SEQ ID NO: 2352 - DNA, 2145 bp, Homo sapiens
attgcagccagtccgggggatcggggacagacatggagaaggagatggaggaccccctggctggagcagaccaacagaataggcaactatggctggagaaccgggtatcagagtaatgcttgacctcgggaaacaccaaatttcttcttccgatcgcagaagtagtactcggcgaaattcactaggtaggaggctcctcatctgggaagaaccggtgcctggggggacctggctggataggtatgggggatcgaggccggtcccctagtctccggtccccccatggcagtcctccaactctaagcaccctcactctcctgctgctcctctgtggacaggctcactcccagtgcaagatcctccgctgcaatgccgagtacgtctcgttcactctgagccttcggggagggggctcaccggacacgccacgtggaggcggccgtggtgggccggcctcaggtggcttgtgtcgcgccctgcgctcctacgctctctgcacgcggcgcaccgcccgcacctgccgcggggacctcgctttccactccgcggtgcatggcatagaggacctgatgatccagcacaactgctcacgccagggtcccacggcctcgcccccggcccggggtcctgccctgcccggggccggcccagcgcccctgaccccagatccctgtgactatgaagcccggttttccaggctgcacggtcgaaccccgggtttcttgcattgtgcttcctttggagacccccatgtgcgcagcttccacaatcactttcacacatgccgcgtccaaggagcttggcccctactagataacgacttcctctttgtccaagccaccagctccccggtagcatcgggagccaacgctaccaccatccggaagatcactatcatatttaaaaacatgcaggaatgcattgaccagaaagtctaccaggctgaggtagacaatcttcctgcagcctttgaagatggttctgtcaatgggggcgaccgacctgggggctcgagtttgtccattcaaactgctaaccttgggagccacgtggagattcgagctgcctacattggaacaactataatcgttcgtcagacagctggacagctctccttctccatcagggtagcggaggatgtggcacgggccttctctgctgagcaggatctacagctgtgtgttgggggatgccctccgagccagcgactctctcgctcagagcgcaatcgccgtggggcgatagccatagatactgccagaaggttgtgtaaggaagggcttccggttgaagatgcctacttccaatcctgcgtctttgatgtttcagtctccggtgaccccaactttactgtggcagctcagtcagctctggacgatgcccgagtcttcttgaccgatttggagaacttgcaccttttcccagtagatgcggggcctcccctctctccagccacctgcctagtccggcttctttcggtcctctttgttctgtggttttgcattcagtaagtaggccagcaacccgtgactagtttggaaacggtttgaggagagaggttgatgtgagaaaacacaaagatgtgccaaaggaaacagtggggacaggagacaacgaccttactcaatcacacgaggttgcagtccagggctgaaatgaccctagaataaagattctgagacagggttttgcactccagaccttggtatgggctccccatgtatttccccattagtgatttcccacttgtagtgaaattctactctctgtacacctgatatcactcctgcaaggctagagattgtgagagcgctaagggccagcaaaacattaaagggctgagatatcttaaaggcagaaactagaaaaggggaaaccatgattatctataagaaaatcaaaagaggggtttgggaatttagctcagtggtagagcacttgcctagcaagcgcaaggccctgggttcggtccccagctcctaaaaaagaaaaaaaaaatcaaaagagaaaaaactaattaaggcaagctttttggttcagaaatgaagtgggcattgtctggcagaggaagtcagcttttggagactggcaccaacatctccacccttcctactctgttattaaagtgacgaattccccatcctg

SEQ ID NO: 2353 - DNA, 2797 bp, Homo sapiens
ccacaatgctggacttccttccaccctcaggatgaacgggcagctccctgggtggcagcgctgggtctgagaaatgtggatgttccttgtgattttgcagctgctgacagcacagggtgtgtgccgtctgtggtcatttccctgcaccccatgtgtgcagaggtgttcgtgtatcttggtgactgcagaggcacacacaggccggcgtggtcactgcttctctctggctgtgaattaaagcaggtcagccgcagacacagaggtgacatgcaggtcacctggaacctctgcagaccgtcctggctgccacccctaagtgctctctggcccctgtgccactgttcctgaggcttccttttttttttttttttcccccatggtttcagctagaaagttctaagctttgataacttaagtgccagttgctaatgaatgaggcatgcaggaaagatggctttcatttagaagccgtatctgaggcatttcccaaagtgagtaactgtttggctagttaggtcctagatgtccagctgtcattatgaaatgcagatggtacggtgaggggacgtccacctttttcagcatgatgtgtgcataggtgagacactgctgctgcacaggttggggaccacacacttatggctgacaggagatcaaagaagatgttttaattgacatgagtaagtgggtggcttgctgaagttattcacagccatcatcagacagccttacctgtggctgagcatgctttatgaaggcttattagaagaattgggatatttatgataaataatttgtgttcatttcagacatcacagacagtttaggttcaaatgcaagggacggaaaactccaaatccaggatggttttaatgaggtgcgagtttacttttccctcagtcgtggagattgctggaccctccgcagtgcagggtccctgctgcagcttggtgctgtactgtgggtggcctcttcccaaggtcacctcatggcccaggcatttccggccactgtcaccctgtctgccccccggccctgcaagatgcaagagagggtttgaggaaggagacccttccaggaggcttctgctacccctgtgcatggcacagcggttggaaaggtcaccttgttatggggccccgtgcttccagagaaaagccagtggtgttgttactcggaaaataaggcagacttgactctggggattctgagtgatcatcgttcgttctggtggaagtgtaggtgcaggacgttctcgtcatctggttgaatcttgctcccacagtcctctgagaacgtcgcctttgtgactacggtttttatttgacagcacggtggtgggaatgtcttccattggggcgtgtggtcagctgccgccagtctaataaggacattggagattctgtaaaagttcttcagaaatattcccctcaaatgttgtttattttaaggcattattttcagtgaaataacatcttttaatacaagagccaagctgttactctgaagtgcccaatgaatgaatgttctttgcattgctgcagataaagaaacttgaatcacggctcagtaccacagagtgcgtggatgccgggggcgaatctcacgccaacaacaccaagtggaaaaaagatgcatgcaccatttgtgaatgcaaagacgggcaggtcacctgcttcgtggaagcttgcccccctgccacctgtgctgtccccgtgaacatcccaggggcctgctgtccagtctgcttacagaagagggcggaggaaaagccctaggctcctgggaggctcctcagagtttgtctgctgtgccatcgtgagatcgggtggccgatggcagggagctgcggactgcagaccaggaaacacccagaactcgtgacatttcatgacaacgtccagctggtgctgttacagaaggcagtgcaggaggcttccaaccagagcatctgcggagaaggaggcacagcaggtgcctgaagggaagcaggcaggagtcctagcttcacgttagacttctcaggtttttatttaattcttttaaaatgaaaaattggtgctactattaaattgcacagttgaatcatttaggcgcctaaattgattttgcctcccaacaccatttctttttaaataaagcaggatacctctatatgtcagccttgccttgttcagatgccaggagccggcagacctgtcacccgcaggtggggtgagtcttggagctgccagaggggctcaccgaaatcggggttccatcacaagctatgtttaaaaagaaaattggtgtttggcaaacggaacagaacctttgatgagagcgttcacagggacactgtctgggggtgcagtgcaagcccccggcctcttccctgggaacctctgaactcctccttcctctgggctctctgtaacatttcaccacacgtcagcatctaatcccaagacaaacattcccgctgctcgaagcagctgtatagcctgtgactctccgtgtgtcagctccttccacacctgattagaacattcataagccacatttagaaacaggtttgctttcagctgtcacttgcacacatactgcctagttgtgaaccaaatgtgaaaaaacctccttcatcccattgtgtatctgatacctgccgagggccaagggtgtgtgttgacaacgccgctcccagccggccctggttgcgtccacgtcctgaacaagagccgcttccggatggctcttcccaagggaggaggagctcaagtgtcgggaactgtctaacttcaggttgtgtgagtgcgtt

SEQ ID NO: 2354 - DNA, 2267 bp, Homo sapiens
agttttcctttcgttctgcggccgctgcagccagccccgcggctccctcagacccgcgggcgcagccgccgggggtgaggcgcttggggaccgcgggccgagcggcggggatccccgagcaccatgctggacccgtcttccagcgaagaggagtcggacgaggggctggaagaggaaagccgcgatgtgctggtggcagccggcagctcgcagcgagctcctccagccccgactcgggaagggcggcgggacgcgccggggcgcgcgggcggcggcggcgcggccagatctgtgagcccgagcccctctgtgctcagcgaggggcgagacgagccccagcggcagctggacgatgagcaggagcggaggatccgcctgcagctctacgtcttcgtcgtgaggtgcatcgcgtaccccttcaacgccaagcagcccaccgacatggcccggaggcagcagaagcttaacaaacaacagttgcagttactgaaagaacggttccaggccttcctcaatggggaaacccaaattgtagctgacgaagcattttgcaacgcagttcggagttattatgaggtttttctaaagagtgaccgagtggccagaatggtacagagtggagggtgttctgctaatgacttcagagaagtatttaagaaaaacatagaaaaacgtgtgcggagtttgccagaaatagatggcttgagcaaagagacagtgttgagctcatggatagccaaatatgatgccatttacagaggtgaagaggacttgtgcaaacagccaaatagaatggccctaagtgcagtgtctgaacttattctgagcaaggaacaactctatgaaatgtttcagcagattctgggtattaaaaaactagaacaccagctcctttataatgcatgtcagctggataacgcagatgaacaagcagcccagatcagaagggaacttgatggccggctgcaattggcagataaaatggcaaaggaaagaaaattccccaaatttatagcaaaagatatggagaatatgtatatagaagagttgcggtcttcagtgaatttgctaatggccaatttggaaagtcttccagtttcgaaaggtggtccggaatttaaattacaaaaattaaaacgttcacagaactctgcatttttggacataggagatgagaatgagattcagctgtcaaagtccgacgtggtactgtcattcaccttagagattgtcataatggaagtgcaaggcctgaagtcagttgctcccaatcgaattgtttactgtacaatggaagtggaaggagaaaaacttcagacagaccaggccgaagcctcaaggccacaatgggggactcaaggagatttcaccaccacccatcctcggcctgtggtcaaagtgaaactcttcacagaaagcactggagttctggccctggaagataaagaactgggaagggtgatattatacccaacttctaatagctccaaaacagctgaattacaccgaatggtagttccaaaaaatagccaggattctgacttaaaaatcaaactggcagtgcgaatggataaaccagcacatatgaagcatagtggatatctgtatgcccttggacagaaggtttggaaaagatggaaacagagagattctcctggaaactcctgccccataaacggccctctcgaacacaatgggacggaatccacccacaacgcgcttggtttgcagatgtcaaagaatctgcagagggtgctactgaagatccagccttagccaatcaccacctcattgggtgaaagttccagggctcaatccaggaccacactcttattggccaggcaggggctcccacagagctttgagtaacttcttggttgtgcagtctgcaggcaatgttggcattgtaaattcctcccttgcagcctccttcatgtggtgaggggatcacttcagctgcctgctgtggacaaagaacatcaaattacagcatcacgagtgctattgttgcctgtggtggtctccctgtccaagcgggaccgctttgcagagaccagaggcatatcgcggcttgagctgaaaatgcatttgttgcagcttaggttgaattatttttcgtttgctctttcttctacacgcgcctgatggatagtgaacctattcatcaaaaaagtgcactgctcttctgtctattgtaccgacttaacctcttccacccaagtccgcatctgtgtgtatcatcaataaagttgtgtgctttgattggc

SEQ ID NO: 2355 - DNA, 2262 bp, Homo sapiens
gtgcgcgggcggatggatcaacgccgccaagtgggtaaggtctgaggattgcgtcattaggcgattttgttgctgtacgaacaccacagaatgtactttgacgacctagatggtggagcctggacacacctcggctgtgtggtgtggcctgctgcttccaggctgcaaacctgacagcatggggctgtactgaataccgcagaccattgtaattcatggggaaagcgcgaatgcagtcccccactacaacaaattatgcagtcgagttttccacatttgggaatatcacaggggtcagcacatccggagtgcaatcgatgagccccacgctgggaaaaaccaccttcgtgatcatggtatcttccctgccagggaaggccggagaactgtatttctggccagagctgctgcagaaggtctctgttcggcatcaggttggatcatgttctgatgatataggaccaagaggaaagaaacagaagcttcactattgggaaaaatcttcccattcaagccaactccaacccagcttctcctggtggattttagagaaaccaatcagcttcattttcaacttcttctatgactccagaggattcactttgcatcttgtgacaaatgaatatattacctgaaaaaaaaatgacaggatagatattgaagaaataattttttataggactctggagtgaagggattaatattgaccagagccaatgaggtcatctcatccttgaggggagcaggtgtgagcttcaaatgcttagggcctctggaaggaagcttccctgttggagaaatcaccaaccggctcagcatggtctgaatgaggatgacaaaaggagttgctgcacagggggaaagcgaagttcccaggagtaagatgtgcaagaagcgggcagccttgcatctcagggctgagttccctcaactgtgtgcttgagggaagttctccccttgcagacacactgctgagtgataaggaagcacctagactccactctgaccagacttggttctgaggcctatgaaatgttgatgggaagaacagaagcaggaaaatctatctattcaaatttgcaagacgtggaaacttttattcaccttcctggttagactgttcctttgtcaaagtaaagctaaggccatggaaaatgagctatttgagagtttgtcgctctaaggaagaacatgctggcctaattgtcccccaagtcaggagagagaattgtaaaaaacacttaaacaggcctaagtaaaggtccagcacattatttatttaagactgaattagaactgagtcattccgactctgaaaaaagagtgttgttggattcttatgtatttaatgggtctgccctattgaaaaccattgtgaagtatggtttcccaagcaagaaatgacactttcactgtcagtctttctaggagtctggcagaatccaggaccgggattacccttatttatgaagcgaccttagactaacagtggctctctgggtctccagacaattggccagggactctaaaaaccagaaacaaagttgagagaactccatgctggtggagaaaaacagctggcctttatcaccagaatgtgccccatagaagcagcaaagcagcaagcgacgttcttaaacaagggcctgtgggcctcgtcaagatctggaggaatcatctacgactcactgctgagtgagagggctaggcagtgtctttaaggtcctgccagctttaacattgtatgctttttcttttgttcaatctctcaccacaactggaagtgttgcctcaactacacaggagaaagtttgcagtaacttagagaaaacattattttaatcaccagtgtatgttctcctgctccctggacaaatccatcagcagcggcaacactgaccaggtccagattggggccgctgcggtggatgtgaatccattgaaactaggggtctccagtgctcctgactcctcacagctctgttcctatgacaaggatggtcagcaaagccagcaaccttgaagggggaccttcttctaatctcctccctgcctgctgagagagtgtacagaagcagccacttgtcagctgcgatgaatccaatgataattacataaatcattaacaatacttgatatttgcccatcacatttctcatttcaaagtgctcataaaattgtatctcatgggtggcactgccggcacaacagaattccaaggaaggattacgggctaagtaaataaagcctggaggctgcttt

SEQ ID NO: 2356 - DNA, 2008 bp, Homo sapiens
acatgatgtcacagacaatgacacaagccggtgtctcattccgacacagcgtccgagctgcacaatgtcacacccgggtgccaaacacttggccccgcgcgacccggccctacgcctcctgccgccgctctccgcgtctccgggggaggtggcccggttcggccgggcagggggctggcgggcgagccccgcgggcgggctggcgagcgggtgatgtcacgggcagcgccattgagacccagagcagcagttctgaagagatagtgcccagccctccctcgccaccccctctaccccgcatctacaagccttgctttgtctgtcaggacaagtcctcaggctaccactatggggtcagcgcctgtgagggctgcaagggcttcttccgccgcagcatccagaagaacatggtgtacacgtgtcaccgggacaagaactgcatcatcaacaaggtgacccggaaccgctgccagtactgccgactgcagaagtgctttgaagtgggcatgtccaaggagtctgtgagaaacgaccgaaacaagaagaagaaggaggtgcccaagcccgagtgctctgagagctacacgctgacgccggaggtgggggagctcattgagaaggtgcgcaaagcgcaccaggaaaccttccctgccctctgccagctgggcaaatacactacgaacaacagctcagaacaacgtgtctctctggacattgacctctgggacaagttcagtgaactctccaccaagtgcatcattaagactgtggagttcgccaagcagctgcccggcttcaccaccctcaccatcgccgaccagatcaccctcctcaaggctgcctgcctggacatcctgatcctgcggatctgcacgcggtacacgcccgagcaggacaccatgaccttctcggacgggctgaccctgaaccggacccagatgcacaacgctggcttcggccccctcaccgacctggtctttgccttcgccaaccagctgctgcccctggagatggatgatgcggagacggggctgctcagcgccatctgcctcatctgcggagaccgccaggacctggagcagccggaccgggtggacatgctgcaggagccgctgctggaggcgctaaaggtctacgtgcggaagcggaggcccaaccgcccccacatgttccccaagatgctaatgaagattactgacctgcgaagcatcagcgccaagggggctgagcgggtgatcacgctgaagatggagatcccgggctccatgccgcctctcatccaggaaatgttggagaactcagagggcctggacactctgagcggacagccggggggtggggggcgggacgggggtggcctggcccccccgccaggcagctgtagccccagcctcagccccagctccaacagaagcagcccggccacccactccccgtgaccgcccacgccacatggtcacagccctcgccctccgccccggcttttctctgcctttctaccgaccatgtgaccccgcaccagccctgcccccacctgccctcccgggcagtactggggaccttccctgggggacggggagggaggaggcagcgactccttggacagaggcctgggccctcagtggactgcctgctcccacagcctgggctgacgtcagaggccgaggccaggaactgagtgaggcccctggtcctgggtctcaggatgggtcctgggggcctcgtgttcatcaagacacccctctgcccagctcaccacatcttcatcaccagcaaacgccaggacttggctcccccatcctcagaactcacaagccattgctccccagctggggaacctcaacctcccccctgcctcggttggtgacagagggggtgggacaggggcggggggttccccctgtacataccctgccataccaaccccaggtattaattctcgctggttttgtttttattttaatttttttgttttgatttttttaataagaattttcattttaagcac

SEQ ID NO: 2357 - DNA, 1882 bp, Homo sapiens
aggagaaagctgaccgcttaggcccgggtagtggtcgtcgtggttttccttgtagttcgtggtctgagaccaggcctcaagtggaaacggcgtcaccatgatcgcacggcggaacccagaacccttacggtttctgccggatgaggcccggagcctgcccccgcccaagctgaccgacccgcggctcctctacatcggcttcttgggctactgctccggcctgattgataacctgatccggcggaggccgatcgcgacggctggtttgcatcgccagcttctatatattacggcctttttttttgctggatattatcttgtaaaacgtgaagcttatgctaatctgtatgttgacaccttgtaattaaaatacgtaccatgagtactctgactctttattgttgtaagaaaaatagttcatcatcagagaatggtcagtttccattcacccatctgaaagattttaagatgaggttgaattctagtttagagttagcagactacccaaatctggcccactgccaataaagtctcattggaacacagccatgctcatttgtttacatgttgtttatggcgactgccatgctgcaagagcagaattgagtagttgtgatagagacctatggcctgcaaagcctaattaatatgtagccctttcagaaaaggtttgcctgcccctgtcctagtgcaaagtgaatttagagtgagccagattatggaggattctgtgactcttgccaaataattttgacttcatcctgtaggtattaagtcattaaggcgttttaaatcatacagtcaggtttgtatttctgagctgtctataatgaatgatatagaaggtggtttcgaaggaggagactccagacaaggaaaacagaaatcttatgttgccaagttgtctttgctcttaggtgggttatcctggagaaaatggactcaggagctaatactgtctacagtggagcttggtgcaattagaagcaaaagactgtacctaactggaatgaggttactttttatggcttatcaaatgcttgtcctggcccgatgcagtggctcatgcctgtgatcccagcactttgagaggctgaggcagggcagattgcatgagcccaggagttcgagaccagcttgggcaacatggtgaaacactgtctctacataaaatacaaaaattagctgggcgtggtggcacgttcctgcagtcccagctactcataaggctgaggtgggaggatctattgagccctggaattcgaggatgcaattaattgtggttgtgtcacagttcactgcagcctgggtgacactccagcctgggtgacaaaggagaccccgtcaaaaaaaaaagtacttgtcccaaaagtttttgtttcctagcttagaatttataatcagattaggttttggagataaagtatatgtggtattttttttttttttgagacagtcttgctctgtcatcaggctggagtgcagtggcgcaatttcggctcactgcaacctccacctcctgggttcaagcaattctcctgcctcagcctcccgagtagctgggactgcgggtgcgtgccacggcgcccagctgatttttgtgtttttagtagagacggggtttcaccatgttggccaggatggtctcgatctcttgaccttgtgatccacctgccttggccttccaaagtgttggaattacaggcgtgagccaccgcgcctggtctatatgtgatttcaaattaggtggccttataaatataagcagatggtttctgggcaaaatcaaatgatttctgtctctattttcttgagtaccaattgtaaaaactgaaattaggttgaggaaagtgctttagaaataataaagatgtacaaatac

SEQ ID NO: 2358 - DNA, 2373 bp, Homo sapiens
aagccatgcatgttacctccaacctcagattttctctctgtctgagtgtctgtttgcagataacttaaaatcacccatctgcatccccactcaccctccagaaagcaaacgtggagagctcactctgcagaataaaatcaagaacaccacggttgtagctgctgtggactcggcggtctgagcagcctccccgagagccgtagttgctagtagaaattcgcgcagaaaaacctctattttcttctaatccagaactggataacttgatgattcaagccatacaagtattaaggtttcatctattggaattagagaaggtacacgaattatgtgacaatttctgccaccggtatattagctgtttgaaagggaaaatgcctatcgatttggtgatagacgatagagaaggaggatcaaaatcagacagtgaagatataacaagatcagcaaatctaactgaccagccctcttggaacagagatcatgatgacacggcatctactcgttcaggaggaaccccaggcccttccagcggtggccacacgtcacacagtggggacaacagcagtgagcaaggtgatggcttggacaacagtgtagcttcccccagcacaggtgacgatgatgaccctgataaggacaaaaagcgtcacaaaaagcgtggcatctttcccaaagtagccacaaatatcatgagggcgtggctgttccagcatctaacacacccttacccttctgaagaacagaaaaagcagttggcacaagacacgggactcaccatccttcaagtgaacaattggtttattaatgcccggagaagaatagtgcagcccatgatagaccagtccaaccgagcagtaagtcaaggaacaccttataatcctgatggacagcccatgggaggtttcgtaatggacggtcagcaacatatgggaattagagcaccaggacctatgagtggaatgggcatgaatatgggccccccatgcatacgtacattcctggacaccctcaccacccaacagtgatgatgcatggaggaccgccccaccctggaatgccaatgtcagcatcaagccccacagttcttaatataggagacccaacaatgagtggacaagtcatggacattcatgctcagtagcttaagggaatatgcattgtctgcaatggtgactgatttcaaatcatgttttttctgcaatgactgtggagttccattcttggcatctactctggaccaaggagcatccctaattcttcatagggacctttaaaaagcaggaaataccaactgaagtcaatttgggggacatgctaaataactatataagacattaagagaacaaagagtgaaatattgtaaatgctattatactgttatccatattacgttgtttcttatagattttttaaaaaaaatgtgaaatttttccacactatgtgtgttgtttccatagctcttcacttcctccagaagcctccttacattaaaaagccttacagttatcctgcaagggacaggaaggtctgatttgcaggatttttagagcattaaaataactatcaggcagaagaatctttcttctcgcctaggatttcagccatgcgcgcgctctctctctttctctctcttttcctctctctccctctttctagcctggggcttgaatttgcatgtctaattcatttactcaccatatttgaattggcctgaacagatgtaaatcgggaaggatgggaaaaactgcagtcatcaacaatgattaatcagctgttgcaggcagtgtcttaaggagactggtaggaggaggcatggaaaccaaaaggccgtgtgtttagaagcctaattgtcacatcaagcatcattgtccccatgcaacaaccaccaccttatacatcacttcctgttttaagcagctctaaaacatagactgaagatttatttttaatatgttgactttatttctgagcaaagcatcggtcatgtgtgtattttttcatagtcccaccttggagcatttatgtagacattgtaaataaattttgtgcaaaaaggactggaaaaatgaactgtattattgcaatttttttttgtaaaagtagcagtttggtatgagttggcatgcatacaagatttactaagtgggataagctaattatactttttgttgtggataaacaaatgcttgttgatagcctttttctatcaagaaaccaaggagctaattattaataacaatcattgcacactgagtcttagcgtttctgatggaaacagtttggattgtataataacgccaagcccagttgtagtcgtttgagtgcagtaatgaaatctgaatctaaaataaaaacaagattatttttgtc

SEQ ID NO: 2359 - DNA, 2235 bp, Homo sapiens
ctctgggtccaaactaaccacaggtctctgggtccttttccggtgtccttaaggttcttggactctgcctggttccctttagcctgtcttcgggcctgccacaattaaatgacggcaagaaagaggtctatgctaagccccataatgaacgtttcaagcaagaaggatgagaattttagatctggaagtgtccgcgggacaggatcttgtcaagacctgatggggaagttctagagtgctgccaggttgccagatttctaagaaggagtttgaagaggagaaaaggatttttgcatgtttagaaatcaaggttcaggagaatcttgacagtgaatgtgtctcattacattgaataacagctacaggatgttcgagagctgttctggcttttctggattctgtgcttcaccaatagaggaatcccatggagcattaattagttcttgcaattccagaaccatgactgatatttggagtcaaaaacatatgagaccaaaaaaatattttcagaaaatgatatttttgaaataaatttttcccagtggaaggacaaaagtaaaacccttggccttgaggcatccatcttcagaaataattggaagtgcaaaagcatattcgagggactaaaaggacatcaagagggatacttcagtcaaatgataatcagctatgaaaaaataccttcttacagaaaaagtaaatctcttactccacatcaaagaattcataatacagagaaatcctatgtttgtaaggaatgtgggaaggcttgcagtcatggctcaaaacttgttcaacatgagagaactcatacagctgaaaaacactttgaatgtaaagaatgtgggaagaattatttaagtgcctatcaactcaatgtgcatcagagatttcatactggtgagaaaccctatgagtgtaaggaatgtgggaagacctttagctggggatcaagccttgttaaacatgagagaattcacactggtgagaaaccctatgaatgtaaagaatgtgggaaggcctttagtcgtggctatcaccttacccaacatcagaaaattcatattggtgtgaaatcttataaatgtaaggaatgtgggaaggcctttttttggggctcaagccttgctaaacatgagataattcatacaggtgagaaaccttataaatgtaaagaatgtgggaaggccttcagtcgtggctatcaacttactcagcatcagaaaatccatactggtaagaaaccttatgaatgtaaaatatgtggaaaggctttttgttggggctatcaacttactcgacatcagatatttcatactggtgagaaaccctatgaatgcaaggaatgtgggaaggcttttaattgcggatcaagtcttattcaacatgaaagaattcatactggtgagaaaccttatgaatgtaaagaatgtggaaaggcctttagtcgtggctatcacctttctcaacatcagaaaatccatactggtgagaaaccttttgaatgtaaggaatgtgggaaggcctttagttggggttcaagccttgttaaacatgagagagttcatactggtgagaaatcccatgaatgtaaagaatgcggaaagaccttttgtagtgggtatcaacttactcgacatcaggtatttcacactggtgagaaaccctatgaatgtaaggaatgtgggaaggcttttaattgtggatcaagccttgttcaacatgaaagaatccatacaggggagaaaccctatgaatgtaaagaatgtgggaaggcttttagtcgtggctatcaccttactcaacatcagaaaattcataccggtgagaaacctttcaaatgtaaggaatgtgggaaggccttcagttggggttcaagcctagttaagcatgagagagtccatactaatgagaagtcttatgaatgtaaagactgtgggaaggcctttggtagtggctatcaacttagtgttcatcagagatttcatactggtgagaagctttatcaacgtaaggaattcgggaagacctttactcatggctcaaaacttgttcatgaaagaactcatagtaatgataaaccctacaaatataacgaatgtggggaagcctttctgtggacaacttactcaaatgagaaaattgatactgatgaaaccttatgattgaaagttgtaaaagaatattttgtgtgtgtgtatagacaacttatcataataagaactcttactcttg

SEQ ID NO: 2360 - DNA, 2550 bp, Homo sapiens
actcgtaggcagcatctgagcaacaggctcaccagacttcagcctcttcactccgactcttccacgctccagctctcttcattaagatattctagaagcaactgaggagtttctacaaacattttggaaattacaggtctcagccaaaatgagtgataccccttctactggtttttccatcattcatcctacgtcttctgaaggtcaagttccaccccctcgccatttgagcctcactcatcctgttgtggccaagcgaatcagtttctacaagagcggagacccccaattcggcggggtcagggtggtggtcaacccagagcttcgaggcatttctacagcacctgacagaggtcatgcaggcacagcatcacgcgcctggaggagctggaggacggcgagtcctacctatgttcccacggcaggaaggtgcagcctgtagacctggacaaagcccgtcggcgcccgcggccctggctcagcagccgggccattagcgcgcactcaccgccctgtggtcaagctgtacgctacggacggaaggagggttcccagcctccaggcagtgatcctgagctctggagctgtggtggcggcaggaagggagccatttaaaccaggaaattatgacatccaaaaatacttgcttcctgctagattaccagggatctctcagcgtgtgtaccccaagggaaatgcaaagtcagaaagcagaaagagtagtaactggaaagtttttataatcaccagtgacttgccagatgcagggaccagctcacagatttatattattctgtatggacaacatagaagttcagcccccatatatctttatggaacagatggggctcgatttcaggttggccatgaagacatatttactataacagttggagacattggagcactctttaagattcgtattggtcataccaactctggatcctccccttcctggcactgcaaggagatacagctgcataatatgaattctggaaaacagttttatgtacctgttcaacgatggttggcacgagatcaagaggatggggaaatctgtcgagaatttcctcttttaagtaaaggacaacctgtccttccagtgacaatatatgaagtgaatgtggcaacgggtgagctatggaatgctggaacagtagcaaacgtctacatttctatccatggggaaaagggagatacaggatccagacaactatttagatcgaagagctccttcaattttttaagaggacaaactgacacctttttcctggaggctgtgcaccttggagatttgtgtaagattgtgataggccatgatggacttggcccaggaaatggttggtttcttgatgatgttgttatcaaggatcccacaacaaattacgaatatgccttcttctgtcacagatggctagatcagggggaagatgattgtaaaattgtcagagaactgtatgccagggataacagtatcttctctgcgagtaggtatcatgtatacacatttcctggaaaactcttttatgatgactggagaaagcatgacacttctgaaattaattgccctctctttatcttctcagggcagaaattggaacttaagagaaaagaaacatggactgcagaaagctggaagtttacaaaaggaaatactcttcagttctataacaagctgactggagggtttgtccgtttgcatccagatggcacagttgacgccattggagagaagacagacaaatatggtgtctttgatgttattttcaacaaaagaaatatatgcattttccaaagtcatgagatgaggcatctttctcttgctcttgacaatggcattgtcactggaatggttagtggtgaagccaccactgagctgcgggtgctttatcagcctaaccgctgtgcacttcttgagtcggcactggttcctggtcacacagttgtttttgatcgtcatggcaaaatagctgatgcatcatcagcaggctatgcaaatctttcaaaagaatttgtgatttttgtcaggggggtgttcctcaacagtgctgtggttctgcttgctacaagcctgtgtcaggccctgtgtctccagcctgatggaagctgcactggagtgggaagccagtctgaaaaatcctactggaaagtgcataaaatcagctctgggatttgcatgtttgaaagtgtgaaaaatgcacaaatgtatctaagaatcaaggatggccgatgcgatggaacaggtacaggagatgttgactgtcattttaaaattaagaagaacttgaagaatgcatccataagcctggaatctacgaagagcccaggattgttagttggacttcagtcagatgggcaggcaaaaccaatgatttataccaaggatgagaatgtttgcttctatccacaagtcatccaataagcaatggaaggaaaacataatgaagaccagttgcctcaagttttcagataattaatattagttggcagagaaaacccaatgggaatgtctgcaacacccagccaagaagaagaaaagatccatgagtc

SEQ ID NO: 2361 - DNA, 1805 bp, Homo sapiens
ttttaaaagctcctttatgttctcatcttctgagaacagatgataggcagcaagaagacagaaacgtggcataaaggatgatccaaggcaagaaaggggtctagtaagcaaggtcaggaggcctaaagaaattactgtaaccatgctaagaacaagatggtgcttctggctgggaaaaggtactagctgctcacattagatggtccttcagctttccaggaactcgctctttggggccattgctattaaagctaggttggagtcatggagcagagcatacaggcatcatcaaccagtaacctctccagctctgtggatgagtgaacaaaagctggtaatgagattaggatgcttttttttttttttttttttagatggagtcttgctctgtcgccaggttggagtgcaatggcgcaatcttggctcactgcaacctgcacctccaggttcaagtgattctgctgcctcagcctcccaagtagctaggactacagatgtgtgccaccatgcccagctaatttttgtatttttagcagagacggggtttcaccatgttggccaggatggtcttgatctcttgacctcatgatccacccgccttggcctcccaaagtgctaggattataggcgtgagccactgtgcctggccaagattaggatgtcttttacaagagtttaggtataactgactggctataggctggcatgagcccataactaggctagtaagtggcaaataagagaacagcaaagtttccataatctgccccttctttcttcccttggctctcccttcttacttccccacagtgaccatgagggtggcaatgtaagtgcccataccagccatttggtgggcagtgccctttccgacccttacctgtcctttgcagcagccatgaacgggctggcagggcctctccatggactggcaagtcaggaagtgcttgtctggctaacacagctgcagaaggaagttggcaaagatgtgtcagatgagaagttacgagactacatctggaacacactcaactcaggacgggtaagcacagatgcttaacgactaggaaagaaaccaagacacaagttctgcaatttggaagaattaagaaaagaatgaaagaggtccctaaattagagatttttttttcttcatttatctaccttgaagaatttagaaaagaatttctaggtgggcacaatggcatgcacctgtagtcccacctacttgggaggctgaggcaagaggattgcttgaggccaggagtttaaggctgcagtgtgctaagatcactcctgtgaatagccactacactccagccaggacaacacagcaagaccccattctctaaaaaacagttttaaataggttgagtgtggtggctcacgcttataatcttagcactttgggagtccagggtggatggatctcgtgagcccaggagtttgagaccagcctgagcaacacagaccctatcttttttttttttttttttttttaaagacagtcttgctcttgttgcccaggctagagtgcagtggcgcaacctcagttcaatgcagcctccgcctctcgggttcaagtgattctcctgcctcatcctctcgagtagctgggattacaggcatgcgccaccatgcccggctaattttgtatttttagtagagacggggtttctccgagttggtcagttggtcaggctagtctaggactcccaacctcaggtgatctgcccacctcagcctcccaaagtgctgggattacaggcatgagccaccgcacacggccagaccccatctttacc

SEQ ID NO: 2362 - DNA, 2382 bp, Homo sapiens
gagttatttcttaaaatttcagaatagatattcacataatcactacactggggaaaaggtaatcaaaacattgttggctttatctcataacttagtatgttttcggttttggtgcgatcatagcccactgcagcctccaactcctgggctcaagcaatccacctgcttcagccttcctagtagctgggactacaggtatgcaccacagctccaggccaacctttttattttgaatgccgcatagcaggagattccataatttttcttttctttctttctccttccttccttcctctttctctctttctctctctcagtctctttcttgacggagtctcgctctgtcacctagactggaatgtgtggcataatcttggctaactgcaacctccgcctcccaggttcaagtgattcccttgcttcagcctcccaagtagccgggactacaggtgcctgccgccacgcctggctaatttttgtatttttagtaggaacaggctttcaccgtgttggccaggctggtctcaaacacctgacctgaagtgatctgcccatcttggcctcctaaagtgctgggataacaggcgtgagccactacaagtgtgagccactgcgacaggcctctttctctttttgagacagtctcgctctgttacccagactggagtacagggatgcaatcttggctcactacaacctccacctcccaggttcaagtgattctcatgccacagccaccagagtagctgggattacaggcgcccaccaccacgtctggctagttttttgtatttttagtagagacggcgtttcactatgttggccaggctggtctcaaactcctgacctcaagtgatccacccatctcagcctcccaaagtgctaggattacaggcgtgagccaccgtgcctggccaagaggctccatgattttcgagtgctgtacctctaaagatcctttttgttttttttaaacagggggcctaatacttgccaagccctgtgcgttatttggagatccagaaatgaacaccacccaggaacttaataaacaagagagggaggcagaagtaaagaggcccgggacaggtctctcaaggggcactgtcatgtaggagtctgcttaggctgccataacaaaacaccacaggctgggtggcttcaagagaaatatatttgctggaaggcaggaagtccaagatcatggtgccatcagggttggtttctggtgagggctgtcttcctagcttgcagacaagtgccttctcaatgtgtcctcacatggcctttcttccgtgcatgagtgaagagaaagctctctggcatcacccttttctcataagggcactaatcctatctgattcgggccccacccttatgactgcatgtaaacgtaatgacctccccaaagcccctacctccaaataccaccacactgggggttagagagacaattcagtccatagcaggcggtctgggaagattctcactctcacatgttgtgttgcactccaggcacctggccaagagaatacaggtgggctccccagggtgctgcatcatcaccaagatgcctatcttgagggaagagggtgagtgaagcccaggccttgtgcaggcagggagagttaaggggagtggggaaacctgggccttccaggatgcagggggctggacccagtgtgctgtaaacgggacaggagcctggaatcagctggagaacatctgccctccagcccctgaccccaagcaataagaggaggatctttcctactggaagtcccttcctgcaactctgcccatgtgggcagaatcctggggtttcacctgagccttctgtttgggtgttctcgggatctcgctgtgtatccaaggaaggttccggggtagggacgcccagccttccttgttccccacctagatgagattgagccacgcccagtgtttgagaagaagcccctggtatgggaggaggatatggagctctattcgaagttcctggaccggaaggaggagctccggctcggccacgccagctatctgcggcagcaccccgaagcccacgcgctcatctccgacttcctgctcttcctgctgctgcgccagccggaggacgtggtcaccttcgccgccgagttcttcggccccttcgacccgtggcgtccgtcgtcaccggccttgggctcctcccaccggcccaaccctttccgctccctggagccggagggagacgcccgctcgggggcggcctaagcggggcccaggcccggacagggcaggaaaccaggggtcgggctgggacgcgggcgggacgcgccggggcgggtgcgctttccgggctgcggttttgggggaataaatggggccctcccgcttctctgc

SEQ ID NO: 2363 - DNA, 2579 bp, Homo sapiens
acttgctcttttttcctcccattttagcagccaaggatgggaattacacagcgaaatgcaggctaatcagctaaatctagattaaatatgctagtccttggggaccttgagctgaattaatggaaaccgaggtttttaatgttccagactaattttggaagctcacttccagcagaggcaaacttgaggctgtccaaagggagcagatggcaaggctttctccaggtgcaccaacctttgaaacagccctcggcaaaaccatgaggaaggaatgctcttcccttagagatcctcgtggtgaattccctcatttccttcaagtctgctcaaatgttacttctcaaacagagcaagaagatcgaagcaaatgaacaaaggtgggatccggttccaataatgaagaatgtgatgactacatgtataccattctggaacagagaaaagactgcctgcagcaatatctctaaaaactacctgtggcagactcagtggatggtcaagtttggctctgaaacaagtctcctcatttgtcagagaaaggacagagaagatccagtttatgtgattaattcaatgatattagtagagatcatagaaagaacattgctttttgcaaaatcagattaaactgcactccaaaacaatactgaatcatgtaaaagcagaacttcctctcagagatttctgtatgcaaagacaaaacaattaggtcacaggataccatgttcttgagactgtatgtccttactaagtttcattttcattcagatatgtacaagaccatttggtatttgtaaagaggttatgtttatctgtgttttcctgaatatagaatgaatgtctttatgacaaaaaactttagctcagaagaatctttatcgcatttaaaataattaacaactatagtgcataatgtataattcaagggttttctgtagcccatttcccatctaccctgtccctgtccccatactccttcctcacctccacccaacctccaccagagataattaagcttttaagaatgagattgatcacttaaaagtaatatatttttactttatttctttaatccatgtttagactttcctacctgccaaaactttgtatcttttaaacttggtattctacttctttctcccatctcaaactatacgtaaatcagtgtgttagaaattccagtgagtttaattgaacagaaagttggggtatcttgtatcccctccttttttttcttttgggacataacctttgtttcccacttgtgattccagaatctatcttggtatgattcaacaccttttatcagctgcttctaaacaactttcaccaccatattgcctcctcattcttccgaaaatacactattttctagtcaggccaaactatacattctttccagagctgaccacacttgttatgttatattcccagctaaatgccttctgtaacatttactacttatccttctggatacaaccccaatgtcaccacctccttgagagcacccctgattccacagggttgagagtcagggtggcctgggaagaccacacatgtcctctgccatcattcagaggtgggtataagtgaaatgggagagttccctggtccccctcacaggatgtgtgacaggggtatggctctcttcttggctgctatgagctcaaagcccttacaagaggtggagcatgcagatgagcaggtgcaggaaccagagcgagagcttttggggtcccgccccacagcagtgtctaggggtgagtttctgtgattcccaaaacccaagtgggcacatgttacagtgtgctcttctagtgttgctgtccaagtgttaactagcttagtggaccctctgcctttttgcaagggcagagggccaatgtgacagctttctgtattctgagctcttatccagcatccaggaagaatcaggtgacacagggacttgaaggatgaatgtgggggttttattgagtggtggaggtggaactcagcaggatagatgggaaactggacaggggatggagtgggaagatcatcttcccctggagcttggccatccactggctgattctctgaccatccccagctgaactcctcctaacagtccttctcttctttcctctgctgcattgttctgccatccagtttgctaatctccttgtttcctgtctcctcatctgctcctggagcctggggttcggagtttatacgggtacaggacagggtgtgtgtcaggtcaaaaggcagctttttgggcatgaaaacaggaatgcccgtcctgtatccaggctagagggtggggcttttgctggggaactgccctcttctacccagtatttccctgtctcctttctgcatcataaagatgtgtggtacccagttggtgcagacgcgaaattcatctgtttctttatgttttctccctttgctctaaaagggtccatatttgcctgcattctagtgctcaccacaccacattggggtatttggttatgtgtctggtttcttcagtagactaatggtgttccttgtgcaagattcttagatgggcttcaataaaatggttgagttgc

SEQ ID NO: 2364 - DNA, 2821 bp, Homo sapiens
tactgcgctcagaaggggcctcagggcctgccccgggttgggggcgttggggtgccctggatgggggcacctttatctctcgtcctgtctccgggtgcgtgcaccctcctccgtcctttcctctgtcgccgcggaccctctccccgagggcccctcccgtcggtcagtctcgggacctcccttccgtctgggcgtgtgtccgcccccggccggcttcctcccgtcgggctcgggtcgaccccaccgtcccgctccgccccgggtcctccctcccagcttccctccggtctatttttctgtctctgggcccctcgttctctttgtttttggactccccagtttcctctgtcttttgacccccccgcccccaccctgactctccctggaacccccacgtttctcgttgtctttctggaacgccgaggcaggtccctcctattttccaaaccccctcctttcccactcctccacaccacccttttctactccagccctccttcttctgtctttggttaccgcgtcccacaacctgcaccacagtcctctgtcttagggtcatctacccagcccctggcctccagcctctccctatcactgcctcttatctgtcagcggactcccgcacctccagattctcagggtcctctccccgacttggcctcaggttttggggggcctctatagtcaagtctgtcctggtcgtcttccccactcctgcccataccatcccggctttcccctgcctgcctgtctctagtttctctcacatccctttttttttttcctttctctagccaccctgaagggtcccttcccaagcccttagggaccgcagaggacttggggaccagcaagcaacccccagggcacgagaagagctcttgctgtctgccctgcctcaccctgccccacgccaggcccggtggcccccagctgcatcaagtggaggcggaggaggaggcggaggagggtggcaccatgggcccgggcggtgccctccatgcccgggggatgaagacactgctgccatggacagcccgtgccagccgcagcccctaagtcaggctctccctcagttaccagggtcttcgtcagagcccttggagcctgagcctggccgggccaggatgggagtggagagttacctgccctgtcccctgctcccctcctaccactgtccaggagtgcctagtgaggcctcggcagggagtgggacccccagagccacagccacctctaccactgccagccctcttcgggacggttttggcgggcaggatggtggtgagctgcggccgctgcagagtgaaggcgctgcagcgctggtcaccaaggggtgccagcgattggcagcccagggcgcacggcctgaggcccccaaacggaaatgggccgaggatggtggggatgccccttcacccagcaaacggccctgggccaggcaagagaaccaggaggcagagcgggagggtggcatgagctgcagctgcagcagtggcagtggtgaggccagtgctgggctgatggaggaggcgctgccctctgcgcccgagcgcctggccctggactatatcgtgccctgcatgcggtactacggcatctgcgtcaaggacagcttcctgggggcagcactgggcggtcgcgtgctggccgaggtggaggccctcaaacggggtgggcgcctgcgagacgggcagctagtgagccagagggcgatcccgccgcgcagcatccgtggggaccagattgcctgggtggaaggccatgaaccaggctgtcgaagcattggtgccctcatggcccatgtggacgccgtcatccgccactgcgcagggcggctgggcagctatgtcatcaacgggcgcaccaaggccatggtggcgtgttacccaggcaacgggctcgggtacgtaaggcacgttgacaatccccacggcgatgggcgctgcatcacctgtatctattacctgaatcagaactgggacgttaaggtgcatggcggcctgctgcagatcttccctgagggccggcccgtggtagccaacatcgagccactctttgaccggttgctcattttctggtctgaccggcggaacccccacgaggtgaagccagcctatgccaccaggtacgccatcactgtctggtattttgatgccaaggagcgggcagcagccaaagacaagtatcagctagcatcaggacagaaaggtgtccaagtacctgtatcacagccgcctacgcccacctagtggccagtcccagagccgcatggcagacagcttaaatgacttcaggagagccctgggcctgtgctggctgctccttccctgccaccgctgctgcttctgactttgcctctgtcctgcctggtgtggagggctctgtctgttgctgaggaccaaggaggagaagagacctttgctgccccatcatgggggctggggttgtcacctggacagggggcagccgtggaggccaccgttaccaactgaagctgggggcctgggtcctaccctgtctggtcatgaccccattaggtatggagagttgggaggaggcattgtcacttcccaccaggatgcaggacttggggttgaggtgagtcatggcctcttgctggcaatggggtgggaggagtacccccaagtcctctcactcctccagcctggaatgtgaagtgactccccaacccctttggccatggcaggcaccttttggactgggctgccactgcttgggcagagtaaaaggtgccaggaggagcatgggtgtggaagtcctgtcagccaagaaataaaagtttacctcagagctgcac

SEQ ID NO: 2365 - DNA, 2524 bp, Homo sapiens
gtcaatatggctgcgttgggatctgttcaccttcaggctgagtcgagactgaggtgaaaaagcggaaaaacgcgagaaaaggtttccccgttgtacagaggctagagtgaggctcggctgaatcggttgcaggcgttggtgcctctgtcagcgtccaggtcactgccgctcccgccccgctcttccctggctgtgctggcggaggctgcgccgatgaacctgactgaggattatatggtttttgaggacgtggccatacatttctcccaggaggagtggggaattcttaatgacgttcagagacacctgcacagcgatgtgatgctggagaactttgcacttttgtcctcagtaggttgttggcatggagccaaggatgaggaggcaccttccaagcaatgtgtttctgtaggagtgtcacaggtcacaactttaaagccagctttgtccacccagaaggcccagccctgtgagacatgtagctcacttctgaaggacactctacacctggctgagcatgacggaacacaccccaagcgtacagccaagctttacctgcaccaaaaggagcatcttagagagaagctcaccagaagtgatgaagggaggccttcgtttgtgaatgacagtgttcacctggcaaagaggaacctcacatgcatgcagggtggcaaggattttactggtgattcagatcttcaacaacaggctcttcacagtgggtggaagccacacagggacactcatggtgtggaggcctttcaaagtggacagaataattacagctgcacccaatgtgggaaagacttttgccaccaacatacactgtttgagcaccagaaaatccacacagaggaaaggccttatgagtgcagtgaatgtggcaaattgtttaggtacaactccgaccttattaaacatcagcgaaatcatactggagaaaggccttataagtgtagtgaatgtggaaaagccttcagcctcaaatacaatgttgttcaacaccagaaaattcacactggagaaaggccttatgagtgcagtgaatgtgggaaagcttttcttagaaagtctcacctacttcagcaccagaggattcacaccaggccaaggccttatgtgtgtagtgaatgtgggaaggccttccttacacaggctcaccttgttggtcaccagaaaattcatactggagaacggccttatggatgcaatgaatgtgggaaatactttatgtacagttcagcactcattagacatcagaaagttcacactggagaaaggcctttttattgctgtgaatgtgggaaattctttatggacagctgcacactcattattcaccagagagttcatactggagaaaaaccttatgaatgcaacgaatgtgggaaattctttagataccgttccacactcattagacatcagaaagttcacactggagaaaagccttatgagtgtagtgaatgtgggaagttctttatggacacttccacactcattattcatcagagagttcatactggagaaaagccttatgaatgcaacaaatgtgggaaattctttaggtattgcttcacactgaatagacattagagagttcactctggagagaggccttatgaatgcagtgaatgtggcaaattctttgtggacagctgtacactgaagagtcatcagagagttcacactggagaaagaccttttgaatgcagcatttgtgggaaatcctttagatgtcgctccacacttgatacacatcagagaattcacactggtgaaaggccttatgagtgtagtgaatgtgggaaattctttaggcacaactcaaatcatattagacatcggagaaatcactttggagaaaggtcttttgagtgcactgagtgtgggagagtttttagccaaaattcccacctcattcggcaccaaaaagttcacactagggaaagaacttacaaatgcagcaaatgtgggaaattttttatggacagctccacactcattagtcatgagagagttcatactggagaaaagccttatgagtgcagtgaatgtgggaaagtctttagatacaactccagcctcattaaacatcggagaattcacactggagagagaccttatcagtgcagtgaatgtggaagagtctttaaccaaaattctcatctcattcagcaccagaaagttcacaccagataaagaatgtatatataaagcagatggggaaagacttcacacagaaatctactctgatttagcactgggacctacgttttaaaaaaagtattcttgtagaatacagataacataaaatctaacatcttaaccatgttaaagtgtatagttcagtaccgttaagtcattcacattgtgcaatgaatatctagaagtcttttcaacttatgaaactaagtctataccttttaaaaccttattcctcactccatccagcctcttgacaagcaccgctctgtatgaattttactagtccgggtacctcatataagaaaacttaagtttt

SEQ ID NO: 2366 - DNA, 1867 bp, Homo sapiens
atcaagggtgaagcatggtggctagcggagcccgcatcctgacaggtgtgctggcgtggccctctacctgccccgccgcggcggcctgcggccaggagaagtaggctggcgacatctggcgggccgcgggccgagggaggggaggcggggcggggcggtgtctccctcacgtgaccccaacagcgcccagcgcgtcgcgctgcgccccaacctcggggtcggtcacagtctgcgcctgcgcgggccccggctcgctagccgtcctgcgggacgccggcgctgatgggaaatccagttatcaaaattgactcaagaagagagaacctaacagaacaataacaatggaagaaattgggaacattatcacaaagctatcatcctgccaaactccaggctcagatgtcacagggtttctattgcctgggctggagtgtagtggcatgatcatggctcactatagccttgacttcctgggctcaagcgatccttccgcctcagcctcctgagtagctgggactacagagacggggtttcgctcttgtgaccaggctggaatgcaatggcgtgatctcggctcaccgcaacctccgacctctgggttcaagtgattctcctgcctccgcctcccaagtagctgggattacaggcatgcgccaccacgcctggctaattttgtatttttagtagagatggggtttctccatgttggtcaggctggtctcaaactcctaacctcaggtgatctgcccacctcggcctcccaaagtgctgggattataggcgtgagccaccgcgccggctgccttaaatctatttatctgacgttcccaactaggaaattttttgtccaagtgagtatatctgattttaaagtagaaatcgaaggtaaaataggatttatctcagttcctatctcccttcaatctattcttcatattgtcaataatttttttttttttttgagacgtggtctctgtcgccaggctggagtgcagtggtgaaatcttggctcactgcaccctctgcctcctgtgttcaggcgattctcctgcctcagcctccggagtagctgggattgcaggcatccgccatcacacccggctaaatttcgtattttttcagtagggacagggttttgcgccaggctggtctcaaactcctgaccttaagtgatccacctgcctcagcctcccaaagtgctgggattacaggcgtgagccgccgtgcccggccatcagtaattttttaaaatgtcacttcaataaatgcttttcctctgccataaagaccaaacatcttgctgtggcctacaggagacaggatgatccagcccttgcctcccttactctcatctctagctaaaactgcgctgctgtctctgcactccagccactggcacttcctgattacttggggcacgctgtactcatcttgctcccagcctctgcccatgcaggtgccctctgccctcagcactgcctttctctacttcatttatagactgctgtccgtcagatctcagttgaagtgtcacttccttggggaagctggcttacactctcgggacttggttaggttcccccgtcaggctcttctatgtcaccatgtttctatttttcacagcacttacctgttttaattacgttgcaaatagtttttgtttgggtctagagaagcatgtattcactagtacattttatttgtgttctctaattattttttctgcagctaaattagaaatttgtagttttccccctaaaaatgcaatgatgttttctctgattttcttgtcacctttcttccaaaaaatccatgtgttcaaagtgcttgcttgcagtttgccccataataaatggttgtttaatcc

SEQ ID NO: 2367 - DNA, 2613 bp, Homo sapiens
tacacggaatgcacagatggctatgagtgggacccagacagccagcactgccggggtgtgtgtgcctgggggaccaaacacccccaggaacccggaaagggattgatagctgctttccaagagacagccccacctccaagaactgccgtgggagcccagcagcccgttctatgcccagctctgctacacagaggccagctctggctctctggaggccagttgagctaggggtggcctcatcctctcccagaaacccaggaaaccttgtccctacccctcagaggagctggatcctgtacgccttctctgaaccactctcctgtcccagctctttgtctcatcacaacctgggagggtagcgtccccaggggtgggtaaggaggccccccatcttgggctgagctagggctagggccgtggggagggatagagacccacttgcaggccgagaatgagggcaacagtgggaacagctgccccatctccagccttggccaaccctggggaggggtcctgagcaggcagacttagcttgttgagcagagtgggaaggctttgctggggccacacatctcagagaaggccgagctgggttcctgcctccgctccctccagggccagcccaggagactggctgtgcccagcaggcccctctctgcagatgtcaacgagtgtctgaccatccctgaggcctgcaagggggaaatgaagtgcatcaaccactacgggggctacttgtgcctgccccgctccgctgccgtcatcaacgacctacatggcgagggacccccgccaccagtgcctcccgctcaacaccccaacccctgcccaccaggctatgagcccgacgatcaggacagctgtgtgggtgagtggggactgctctggtgcctggcttccagtcctctcaccaggcgtcttaaactcagacctcatgttcctccccagctcaaaagggccactggtgatgtccacaccctcatccagacactcatgttgtttaggacctgccgcaggtggccccagcttgtgtgccactgctccagccagctccgggcccctcccctcggttgctgcagagacactgcaggaagtctgccttccagtgtctgtcccctgggagccacaggccttggaggaaggacagtccaggaatcagtgttgctggggatgtttggacaggaccttatttcctgtgcaacccccaacatgtggttttagaggttaggggtgcctttcctgatggctccaggctggtgaactcttacgcgtgctgttgagagaaccgaatacaagtgttggaactatctgtcatgttgggtggtgtgcgggatcccaggcaggggctgagtggtgtctctcgcagatgtggacgagtgtgcccaggccctgcacgactgtcgccccagccaggactgccataacttgcctggctcctatcagtgcacctgccctgatggttaccgcaagatcgggcccgagtgtgtggacatagacgagtgccgctaccgctactgccagcaccgctgcgtgaacctgcctggctccttccgctgccagtgcgagccgggcttccagctggggcctaacaaccgctcctgtgttgatgtgaacgagtgtgacatgggggccccatgcgagcagcgctgcttcaactcctatgggaccttcctgtgtcgctgccaccagggctatgagctgcatcgggatggcttctcctgcagtgatattgatgagtgtagctactccagctacctctgtcagtaccgctgcgtcaacgagccaggccgtttctcctgccactgcccacagggttaccagctgctggccacacgcctctgccaagacattgatgagtgtgagtctggtgcgcaccagtgctccgaggcccaaacctgtgtcaacttccatgggggctaccgctgcgtggacaccaaccgctgcgtggagccctacatccaggtctctgagaaccgctgtctctgcccggcctccaaccctctatgtcgagagcagccttcatccattgtgcaccgctacatgaccatcacctcggagcggagcgtgcccgctgacgtgttccagatccaggcgacctccgtctaccccggtgcctacaatgcctttcagatccgtgctggtcctcgcccggccggtgacgggcccccgggagtacgtgctggacctggagatggtcaccatgaattccctcatgagctaccgggccagctctgtactgaggctcaccgtctttgtaggggcctacaccttctgaggagcaggagggagccaccctccctgcacctaccctagctgaggagcctgttgtgaggggcagaatgagaaaggcccaggggcccccattgacaggagctgggagctctgcaccacgagcttcagtcaccccgagaggagaggaggtaacgaggagggcggactccaggccccggcccagagatttggacttggctggcttgcaggggtcctaagaaactccactctggacagcgccaggaggccctgggttccattcctaactctgcctcaaactgtacatttggataagccctagtagttccctgggcctgtttttctataaaacgaggcaactgg

SEQ ID NO: 2368 - DNA, 2746 bp, Homo sapiens
agttaggatccgctgtggcgtcctgagtggagtttgggaccccagggagggagggtgtgggcgttcgggtccagaggagctgtttagtatccaagatgaatgacagcctgtttgtcagtttggacagacttttgctagaatttgtcttccagtatgagcaagacataagtactaaagaagagatgattcaaagaattaataaatgctgtgaagatattaaggaaaacaaagtaactatttgtaggatacacgaaactataaatgcaacagatgaggaaattgatcattactgtaaacatagtgaggagattaaagacaactgtagaaactggaagccaacatgtgatgtttttcgtaaacatgaagattatatgcaggaccaatttactgtttatcaaggaactgttgaaaaagacaaagaaatgtatcatgattatatatgtcagtataaagaagttttgaagcagtaccaactaaaatactcagaaacacccttttcacgtgaatattatgagaagaaaagagaacatgaagaaattcaaagcagagtgttggcatgtactgaacaattaaaaatgaatgaaacaatttttatgaaatttcgagtgcctgctccctttccatcacttactaaatggactttaaacattgttaatttgagatgtgaaacacaagatattcttaaacatgccagcaatcttaccaaaagttcatccgaattgaagaaagaagtagatgaaatggaaatagaaattaattatttaaaccagcagatatctaggcataatgaaactaaggctctttcagaaactctggaagaaaagaacaaaaatacagaaaacagaaaagaactgaaagaaagaatttttggaaaagatgagcatgtacttacattgaataaaactcaaagcagtcaattatttcttccttatgaatctcagaaattagtaagaccaataaagatgcattcttcagaaccaagagttgcagatataaaagaagaaagttctgtgaagcagtcaaagcttgccaatattgactttagacaaaaagaaaatgatacacagatatttaatgactctgctgtggataaccattcaaaatgttcacatattacgactatcacaagttcacaaaagtttatgcaagtcagattgttaaccccacagaaacaatcaaattccaatcagtggtcggaaaaaggggataaagatgctgagtatggagataaagggacagtaagacaagtaagagaatcaaaatgtacttcacaagctatatatactgaacattttgggaagtcaatagaaaatgatagtgatgaagtagaagagagagctgagaattttccacgaacgtctgaaattcctatatttttaggaactcccaaagctgtgaaagcacctgagtcattggagaaaataaaattccctaaaacccccccgttcgaaattaacagaaatagaaatgcagtacctgaagttcaaacagaaaaggaatcccctggactttcttttcttatgagttatacttctagatcacctggattgaatttatttgattcttctgtatttgatacagaaatctcatcagatcagtttaatgaacattattctgcaagaaatctaaatcctctgtcatcagagcaagagattggaaacttatttgagaagccagaaggagaagatggctttacattttcttttccatcagacacttcaactcatacatttggagctggaaaagatgattttagttttccattttcatttggacagggtcaaaattcaataccttcttcttctttaaaaggtttttcatcttcctcacaaaatacaacacagtttacttttttttgagctagtcattaattccttaaattattttactgttctgtgttcatgagggcataaatttacattattgcttaaaacatgaagactgctttcttttattgataaagcagtaatgtttacattatttgattatatttattgaaatattgaaatactgaatattttgggttttgtgtgtgctattaactaatcattatttattttggttttgattttgcgagccgtggtcaggtagaacttttattaatcttaatagaatttgatgcttttttcattactctttatttaaatattaagcctgcttctccttggaacctaaggtttttttctggaagtattgttggtactttgataagaacaagaactgcagtagtaactccagagttagtgctgaagcgtactttagctactaaaaatttctattaaaattattgggtttcacttctgcttcactatgtagtatacagagtggtactgtaataataatttcaaataatttatgttaataacaaaatctgtgttattttcttctaatataacacatggtacaattctaattttatgagttatgctaatgctttcaatggctaaaaattaaatgtaaagggcaagagtaatttctgaaaattggattgttgtatcagtggtgatcctgttaatattcttttttgcttaaatattttttgaagaacatttacaattttgtctccttcaataacaaaaatttcttctttatgttttgtgttcagtatttgtcaattaattatatagcttaagtgaagatatttaagatttgatgaacttctgtaaacattttgctcaatatcattgtattttgtgctttgtaaattagctgtactgagttaccaagtaataaagggtttgactcc

SEQ ID NO: 2369 - DNA, 2158 bp, Homo sapiens
gataaatattgtgagccacatgactatgaatactgctgtccttgtgagtggcaccgtacagaacatgataggcaactcaatgaagtagagaacaatattaagaagaaagcttgctgttgtgagggattcccattccatgaggttattcaagaattccttttaaacaaggataaattggtgaaggttatcaggtaccaaagacctgatttgttattgtttcagagatttactcttgaaaaaatggagtggcccaatcactatgcatgtgagaaattgctggtacttttgacccattatgacatgatagaaagaaagcttggtagcagaaactctaatcaactacagccaattcgaattgttaagactcgaatcagaaatggagttcattgttttgaaatagaatgggaaaagcctgaacattatgctatggaagataaacaacatggagaatttgctttattaacaattgaggaagaatcattgtttgaagcagcatatcctgagatcgttgctgtttaccaaaaacaaaagttagaaattaaagggaagaaacaaaaacgtattaagcctaaagaaaacaatttgccagaaccagatgaagtaatgagctttcagtcacacatgactttaaaacccacatgtgaaatctttcataagcagaattccaagttaaattcggggatttcccctgatcctacattaccacaggaatctatttctgcctcattgaatagcttgcttttacctaaaaatactccatgtttgaatgcacaagaacagttcatgtcttctctaagacctttggctatacagcaaattaaagctgtcagtaagtctctaatttcagaatctagtcaacccaatacctcatctcataatatatccgtgattgctgatctacacttgagcactattgactgggaaggtacttcttttagtaattctccagctattcaaaggaatactttttctcatgatttaaaatcagaagttgaatcagagctatcagccatccctgatggctttgaaaatatcccagaacaactgtcctgtgaatcagaaaggtacactgcaaacataaagaaagtgttggatgaggattctgatgggattagtcctgaggagcatctactttctggcattactgatttatgtcttcaggatttgcctttaaaggaacgaatatttataaaattatcatatcctcaggataatctacaaccagatgtcaacctgaaaactttgtccatacttagtgtaaaagaatcttgtattgctaacagtggttctgattgtacatcacatctttcaaaggatcttccaggaattcccttgcaaaatgaatccagagactctaaaattctaaaaggagaccagctgcttcaagaagactataaagtcaatacttctgtcccttattctgtcagtaacacagtggtaaagacctgcaatgttagaccaccaaatactgctttagatcatagtagaaaagttgatatgcaaaccactcggaaaattttaatgaagaagagtgtttgccttgacagacattcctctgatgaacaaagtgccccagtgtttgggaaagctaagtacacaactcaaagaatgaagcacagttctcaaaagcataattcatcccatttcaaagaaagtggccataacgagtagccctaagatacatattaaaggaactgaacagtgtgtcagatcttatgaaacagctgaaaatgaagaaagctgtttcccagattcaacaaaaagttctctgagttctctacaatgtcataagaaagaaaacaactctggtacttgtttggatagccctcttcctttacgccagagattaaaactaagattccaaagcacttgaaatttaaaacacttaggtataacttaactattttagtactatcagcaatagcagagacagagggaaggtatctagttcatgtgtggtaaaaattttaatgttctctgtgtcatgaaacacttgccattttaatcaaagttgtaatttttaaaaagtcacctaaaactctggttttaaaagatcctctgtattgaaaacttctgataatgtatgtcattatgtccttactattccttaattgtagttttaaaatattggtatagtacttgacagagtaaatacttc

SEQ ID NO: 2370 - DNA, 2519 bp, Homo sapiens
acccagcagccctttcctcccacggtgccaaccaaggcttatgattcaacagttttgaagacaagaggtaatccttatagatatgaactgattgatattcccatggattcaaagaagaaagcactgacttggccaggtcaaggtgtatattatgattttcccagaggtgttgagaaaaataagccagtattctacccaaaacctcctaaaaccttcgctcctaacacttctttaaattcatgggaccctatttgctctgccaaagaagccaacatacaaagaaatcttgagaggtcccactggctcacttcgtacactcatgattttacaggtctggggcccatggacccccttgaactggatgattaccatgaaaagatggtagcagagttaacacgaaagataggatttgacccagagccgcaagaaaaattccaccctgtcttcaaacctcccagaccgttggaaggacgaattgcccgattaattcagaaccgacgttctctggaggctatagtccagcaaagaccacgttcctgtccagattgtactcctagagttttgtgtaattttcatacctttgtacccagttctaaagaaatggtggcacttagtgataacataccagccggtgtgacccataaaaaccaggatattgaagagaagatcatagaagaacagagcttgctgtctacctatgaactcccatcttgttacccaacaaaagacctaactagcatttatgacataaagccatttccaaaaatcacagatactaaaaagacagaagatttatactggagacagcagtcactaaaaacccaacccacaccttactgtaaaccagaccactggattcactatgaaaatcttaaatctcccctacgtgatcagtataatatgtgtccagaccctgttagccttagtaaacctagtgttttacaaaataaacaagacacggaagctttcactttagaacattttttaagtaagccagaagaagagttgttcttgaatatggaaaacaatgaagaaacaagacctgttcttggttggattcctagagctggagtgaccaaacctcagaccaacctgctggagcttaagaactctttttcaaaaactggtgcacaaaagcgtttccataaatcaattctagaagaccataaagacctcagggataatgagcattcggggatgaagcaccaattctatggccataattcctattatttctataattgagatactcattcttcccttcaaaacccagcctcttgcaagaagctaaaaatataacagaatttccttcgtattgctggattctgttttctagattaaaccacaaggaccttgttagtgaggtttacattttcaggaatttaagttagtatctggttggaggaacccagaaaaggtgatgttatgacttcttgaaaagtttaacaatttggcaataaaatattagaactagaaaaatttatagtctttaatctctcatcttcagattatacaaggaaattttccaaaatcacaaaaagcaatgtgtacaacaaagtttacatcattgtttcaccaaaaaaaattgaaaagctggaaagaactcaaatgatcaataattaatgaatgactatacaaattatagtatcttaataaaaatgagaacactgtccctttatgtaaatttttgtacatagtagcattaggtagaaaagacaaaacccaaacacctagttaattgagggatggacacctctaaaaactatattgtcttaaaagtatgtggactctgttcctttatgtaaacatgtaaagaaaataagtcagcgaaaaaaatgaaacccaaaactctctgcatgtacacattacaaattgaattgtttgcttacccttaaccttctgattgagaaacataactgtttcttttatgcagataaaattattttactgaagatctagcaatggccttaattagcaactggtgagttctaattatagcaagaaaggatggcttggtatcagttattacagagccccaaatcttcatttctggagtgtgttctctaagagtttggctaactcccatatgcaagtcaattcatttaatgtgccaagaggtagattttaaacatagtctatcgtggaagttcaagaggaatttctttaagtattttgtgaatatttattttaattttatgaccaacatgtcatttggttgtaacctccttaaaactattctgggctaaagttagagaatttttttccaactgcattctgtacagcactagttacattatgacaggaagtaaaagtttacatggtgaaataatactggggaaatcggagcaacaatgtcagttgcatgccttggtcactgggttctctatagcctttgatatgtaatgcaattgggagtgtctgaagtgagggagatatagtgtacacactttttatcacagagtagatcactggaatggaattccaaataataaactttggaaggtgtaactctccagtat

SEQ ID NO: 2371 - DNA, 2199 bp, Homo sapiens
agatgcagaggaagctggaaaggtggcagtgcacctgggtcgctggagctgccgccgttcctaggagaccaaggagcagcaagcctgcgggggagggggagcaagtgggttgctgcttttagcagctgaaagggctgcagggagctctgggtaagacattttctgttgctgctgcttttgcggtagaagctgctgcgagtaagtcagaggaaggaggattgagaagggaggaggcttcacttgcagccatgctgaatcactgttgctgatcagatttcccactggtctgctgggagaatcaagaacagaactaggatccccgagtgcatacacagttcagcagctaccaccctggctgggcctcacacaatggagggtgaaagtaaacagctgttgtgtgacgtgatgattgtggcagaagatgtcgagatagaagcccaccgtgtggtcctggcagcctgcagcccctacttctgtgcgatgttcacaggtgacatgtctgagagtaaagccaaaaagatagaaatcaaggacgtggatgggcagacgctgagtaagctgattgactacatctatactgctgaaatcgaggtgactgaagagaatgtccaggtgctgctcccggcagccagcttgctgcagctcatggatgttcggcagaactgctgtgacttcctgcagtctcagttgcatcccaccaattgcctgggcatccgtgcgtttgcagatgtacacacctgcactgaccttctgcagcaggccaatgcctacgcagagcagcactttccagaggtgatgctaggagaagaatttcttagcctgagtctggaccaggtgtgcagcttgatatccagcgacaagctgaccgtttcttcagaagagaaggtgtttgaagctgtgatctcatggatcaattatgagaaagaaacccgtttagagcacatggcaaagctgatggaacatgtccgacttcctctcttacctagggactacctagtccaaacggttgaagaagaagctttgataaagaataacaacacctgtaaagacttcctcattgaggccatgaaataccatctcctccctctggatcagagactattgattaagaacccaaggaccaagcccaggactccagtcagccttcccaaggtcatgattgtggttggcggccaggcacccaaggcaatccgcagtgtggagtgctatgatttcgaggaggaccggtgggatcagattgctgagcttccttccagaagatgcagagcaggtgtggtgttcatggctggccacgtgtatgccgtgggagggtttaatggctcactgcgggtgcggacagtggatgtgtatgacggcgtgaaggaccagtggacgtccattgccagcatgcaggagcgccggagcacactgggcgcagcggtgctcaatgacttgctctacgcagtgggaggctttgatggcagtactggcctagcatcggtggaagcctacagctacaagaccaacgagtggttctttgcggccccgatgaacacgcggcggagcagtgtgggtgtgggcgttgtggaggtggaggtggaggttgcagtgagccgagatcgcgccattgcactccaacctaggtgacaaagctacacgccatctcaaaaaaaaaaaagaaaaagggttacaaaaggttcccagttccggggcatcagcctgagtgcgcttgagctgctccaaacctggcccttccccactcctctagcatcgccacccgcatggccctggaactcccgcggcggcgggggcgggcccgtgcctgctgtgccccgacttcccacaccagccgcgcccaccgcaggtgggactcaggttcgccctctgggccaggtccttcacgaggagggagctacccttcgccagaagtttgtgagaatgtggccgcccttttcctgccctctgccccatgtgggtggggggcctcgtggcccggccggcgccccgtccccttctgcatgtctgaggccaccggcaaccgccgccccactccagatttgcccccgccttgttttgaaagccccttatttataacttttatactttgtgcaggtcgcggcgcttcctgcctcatcctcggctgcatggggcgggggcgctgtttttaacgtgcccgtttgtactgatgtatgaacttgtcaataaacacaattgtttgtt

SEQ ID NO: 2372 - DNA, 1896 bp, Homo sapiens
acacatccggtagagttagagcccgtgcggaggcggtgcggagcatttcggctctgagcggctgggcgaccggcgcgtcgtgcggggctgcggcggagcctccttaaggaaggtgcaagaggttggcagcttcgattgaagcacatcgaccggcgacagcagccaggagtcatgagcgacagcggcgagcagaactacggcgagcgggaatcccgttctgcttccagaagtggaagtgctcacggatcggggaaatctgcaaggcatacccctgcaaagtctcgctcccgctcccatagacgatcacgtagcaggtcttacagtcgagattatcgtagacggcacagccacagccattctcccatgtctactcgcaggcgtcatgttgggaatcgggcaaatcctgatcctaactgttgtcttggagtatttgggctgagcttgtacaccacagaaagagatctaagagaagtgttctctaaatatggtcccattgccgatgtgtctattgtatatgaccagcagtctaggcgttcaagaggatttgcctttgtatattttgaaaatgtagatgatgccaaggaagctaaagaacgtgccaatggaatggagcttgatgggcgtaggatcagagttgatttctctataacaaaaagaccacatacgccaacaccaggaatttacatggggagacctacctatggcagctctcgccgtcgggattactatgacagaggatatgatcggggctatgatgatcgggactactatagcagatcatacagaggaggaggtggaggaggaggaggatggagagctgcccaagacagggatcagatttatagaaggcggtcaccttctccttactatagtcgtggaggatacagatcacgttccagatctcgatcatactcacctcgtcgctattaaagcatgaagactttctgaaacctgccctagagctgggatattgtttgtgggcaatattttttattgtctcttgtttaaaaagtgaacagtgcctagtgaagttaggtgacttttacaccttttacgatgactacttttggtggagttgaaatgctgttttcattctgcatttgtgtagtttggtgctttgttccaagttaagtgttttcagaaaagtatgttttgcatgtatttttttacagtctaaattttgactgctgagaagtttctattgtacaaaacttcatttaaaaggtttttctactgaatccagggtattctgaagatcgaagcctgtgtaaaatgctaccaaatggcaaaaagcaacaataaacagtttgatttttacttttctttctaacatatcaatgcttagcagaactattcagattgtcagtagtaaatttaaagacaaatgcccgttttcctccagtccatgaaacataccatacttatatacctgcaactaagtgtttaaaattatgctctgtaactctgtactgctagtattagaactaaaaatcttaaaatacagccagtgcttaatgcttatatcaatgtggatttgtcggcttttatgtaatctgtaatatgtatagcaggaaatacgaagagttacacagtgtatgccttaaaaggctgtttcttaaaggtgttacaaggggataatggtatttcaactagttatcagcaagtgacaatacattccaccacaaatacactcttgttcttctagcttttagactatatgaaaaaaccgggtgcttcaaagtacatgataagggaacactatacctgtcatggatgaactgaagactttgcctgttcattttttaaatattattttcaggtcctttgcttaccaaaggaggcccaatttcactcaaatgttttgagaactgtgtttaaataaacgcaaatgaaaag

SEQ ID NO: 2373 - DNA, 2002 bp, Homo sapiens
agagtccagggagagtgcgcgggcggccgccggctgaatgaagcctgggacgcgggagccgcgccgcgcgcagtgtctgcagtgccggaggtctgggaggctccgggcgaagcctccctgctgcaggttatgatgatgtcagacaatgctaaaggcagagcagctcattcatggaagaaaagagggagtatttcttctctaagtaatcatgaattttggcgaaaggaaattcatgggcgcatcaaagattctatgagtactgtgtcttatatggaagaacccagtcagcgtgatgatatctctcgccttacagttcagatggaaaacacctatcagttgggtcctcccaaacattttcctgtggtcaccgtcaatcatattttgaaagatgtagtaaccagctatctacaagtagaagaatatgaaccagagctctgtagacagatgactaaaaccatttctgaggttattaaagcccaggtcaaggacttgatgattccacggtataaactaattgtgattgttcacattggacaactgaacaggcagagcataattattggaagcagatgcctctgggatcctaaaagtgataccttttcatcttatgttttcagaaattcttctctcttcgctcttgcaaatgtctatgcagtttaccttgagtgattgaaaataagaaatctagctcttacttttgaaaattctgaggcaggctgtatgtctgtacacaaaagttttactgccaaaaactttgagaaagaaacaacactgatatttcaaacaactggaagcttttgaattttttcatattctagtaaagatttggggaggggagggtagccacagaaagaatcttgtttatctaaagcaggaacttgatcttggttttgctggattgctttccatagacatagattcttattaaatatttgttttggtactaattattttaattattctttaattagagtgttacaatttcctgcattgttttttaataaaaagaagctttagaaaaactatggctatataccctgaccaataaatgatagtagaatattcaacatggtatacacaaatgataaataatgtgcctcagtgctgcatataaaagaatactggttttcattttgtacttaataaattgagcagcattcattaagtgcaattattgttacatgtacctgacagttgaaactgctgaggtagaattaatggcttcataacaattatcgtggtcccacgggctgcaagctaaaactagaagctcttgtggcttgcctgcactttacacaattgtgggagaaccgaaagttggctcttcagtaatggaaactataaagtgaataaaggctttttgggacactgaagtagacattgtgatattaaatatacatgatgcttaatactaaatgtgtctgtaacacataaaatcatttattggaaagagacattgcttttaaatatcctaggctaacaaactttttcacaaaatatatggctggcaccttaacaaataaagcatgtgtagttaccattttactcctatgaatttaatactaaagtgacccagtgaggtttttgaatagacgggtgctaaaatttacagggctgaaatagcttattattctgctggttaatgtatcttacgccacggatcatttatttttatgaagctttcaagtctttgtgtgcaagtaaaatgatgttgtggcgttgttcttggatggtaagtggactgcctagaggacatttgttaaaggtcaaagactaattgtacacatatggagaaaattagcaatgctgtagtcttaaggaaaaaatgatttatcattcatatcaaaaagagtttagcaaatggaaaaccagttaatgctttaattttaaaatgttttggtgtcttacttttccctaaaaatgacatgtagtaaaaaatggatacttttaaaatcccttcccttctgctattttctggcttttaaagtgattattcaaaatg

SEQ ID NO: 2374 - DNA, 2048 bp, Homo sapiens
aaaaacttaaatatagctaccaccgctttgaaaggaatggtttgtgtccaaacagcattttccagacaagctctgtacttttttgccaaaagaattaactttaaactgaaggcagtggacagttaaacaagagtcggcactgggaacagctgtgcgtagaccagaccagtgacttataaggaggcgatcgagatcggatgacagcaaatcatgaaagctacctcctcatggcaagcacccagaatgatatggaagactgggtgaagtcaatccgccgagtcatatggggacctttcggaggaggcatttttggacagaaactggaggatactgttcgttatgagaagagatatgggaaccgtctggctccgatgttggtggagcagtgcgtggactttatccgacaaagggggctgaaagaagagggtctctttcgactgccaggccaggctaatcttgttaaggagctccaagatgcctttgactgtggggagaagccatcatttgacagcaacacagatgtacacacggtggcatcacttcttaagctgtacctccgagaacttccagaaccagttattccttatgcgaagtatgaagattttttgtcatgtgccaaactgctcagcaaggaagaggaagcaggtgttaaggaattagcaaagcaggtgaagagtttgccagtggtaaattacaacctcctcaagtatatttgcagattcttggatgaagtacagtcctactcgggagttaacaaaatgagtgtgcagaacttggcaacggtctttggtcctaatatcctgcgccccaaagtggaagatcctttgactatcatggagggcactgtggtggtccagcagttgatgtcagtgatgattagcaaacatgattgcctctttcccaaagatgcagaactacaaagcaagccccaagatggagtgagcaacaacaatgaaattcagaagaaagccaccatggggcagttacagaacaaggagaacaataacaccaaggacagccctagtaggcagtgctcctgggacaagtctgagtcaccccagagaagcagcatgaacaatggatcccccacagctctatcaggcagcaaaaccaacagcccaaagaacagtgttcacaagctagatgtgtctagaagcccccctctcatggtcaaaaagaacccagcctttaataagggtagtgggatagttaccaatgggtccttcagcagcagtaatgcagaaggtcttgagaaaacccaaaccacccccaatgggagcctacaggccagaaggagctcttcactgaaggtatctggtaccaaaatgggcacgcacagtgtacagaatggaacggtgcgcatgggcattttgaacagcgacacactcgggaaccccacaaatgttcgaaacatgagctggctgccaaatggctatgtgaccctgagggataacaagcagaaagaacaagctggagagttaggccagcacaacagactgtccacctatgataatgtccatcaacagttctccatgatgaaccttgatgacaagcagagcattgacagtgctacctggtccacttcctcctgtgaaatctccctccctgagaactccaactcctgtcgctcttctaccaccacctgcccagagcaagacttttttggggggaactttgaggaccctgttttggatgggcccccgcaggacgacctttcccaccccagggactatgaaagcaaaagtgaccacaggagtgtgggaggtcgaagtagtcgtgccaccagtagcagtgacaacagtgagacatttgtgggcaacagcagcagcaaccacagtgcactgcacagtttagtttccagcctgaaacaggaaatgaccaaacagaagatagagtatgagtccaggataaagagcttagaacagcgaaacttgactttggaaacagaaatgatgagcctccatgatgaactggatcaggagaggaaaaagttcacaatgatagaaataaaaatgcgaaatgccgagcgagcaaaagaagatgctgag

SEQ ID NO: 2375 - DNA, 2473 bp, Homo sapiens
ttgtgatgaacttcaaaaacaataattctaagtggaagacctataaaggaattgtgaataatgaagaaaaggtgcttcagggtaactctaactttcgggacccagtgcaaaacaatttcatccctcccatcgtggccagatatgtgcgggttgtcccccagacatggcaccagaggatagccttgaaggtggagctcattggttgccagattacacaaggtaatgattcattggtgtggcgcaagacaagtcaaagcaccagtgtttcaactaagaaagaagatgagacaatcacaaggcccatcccctcggaagaaacatccacaggaataaacattacaacggtggctattccattggtgctccttgttgtcctggtgtttgctggaatggggatctttgcagcctttagaaagaagaagaagaaaggaagtccgtatggatcagcagaggctcagaaaacagactgttggaagcagattaaatatccctttgccagacatcagtcagctgagtttaccatcagctatgataatgagaaggagatgacacaaaagttagatctcatcacaagtgatatggcagattaccagcagcccctcatgattggcaccgggacagtcacgaggaagggctccaccttccggcccatggacacggatgccgaggaggcaggggtgagcaccgatgccggcggccactatgactgcccgcagcgggccggccgccacgagtacgcgctgcccctggcgcccccggagcccgagtacgccacgcccatcgtggagcggcacgtgctgcgcgcccacacgttctctgcgcagagcggctaccgcgtcccagggccccagcccggccacaaacactccctctcctcgggcggcttctcccccgtagcgggtgtgggcgcccaggacggagactatcaaaggccacacagcgcacagcctgcggacaggggctacgaccggcccaaagctgtcagcgccctcgccaccgaaagcggacaccctgactctcagaagcccccaacgcatcccgggacgagtgacagctattctgcccccagagactgcctcacacccctcaaccagacggccatgactgcccttttgtgaacacaatgtgaaagaagcctgctgtggtactgagcgtcgggctgtcacaaggcactggaagaagggagcctgctggtccagagtgtgcgtgtgtatcggtgtgtgtgtacacttgcatgtgtgtgtgtgatccagtaggatcctagagacaacctgtcatactgtttacaaaattgtgcagctggtttcgtgctgacccttagggtgcgtctgttgggttttgttgggctagaaaaatgaaaatttttagatggcgttttcattcctctgactgatattgagctgctttggtgttaaaggtgtaatgtgtacagagttgtatttaacaataataaaagtaacttaagtttgctctatcagattttagttctgcacagaggttaagtgggaaaatgcagctgttgcaaaatgtatataaatagtatgttcatttttttcagtatattatctgatactgtgttagcagcaggtctgcttaaacctagtcttgttgttattgagtcatttcctctcctttgataactagaactgaaagcatttttaacattcttctcctggaagaaatgaattacttgaagcatgaaaagcacaccagggtggttgtttatttagcaattatgactgtagatttaaaaacaagcaaagaaacaacacctcagcagctgcccgtttccttagtctccacttcagagggggatgcgaagaggtcggcccagctccggtgaccatgaaggtggcacaggaattacagtgtgaatggctgtgtcagatgttttcgtacctcagattaaaaatattgctgaggtcagacgccacaattttcatgactttcttcagaagtagcacattttcgtgacttccgctgtcctctgaaaaacaaagttatttggaacatgttcatgcaaaagtgattctgaccaagtctaaatcgagcttttctactgacatgaaactgttggaaactgatctcattttataagaaatgattttcccctcaaggaggcgtctgtaattccagaacagtccagacatcagctgtacctcatgctcagtagtttttatttgagtttcttttgtgagttaactatgggagatttaacctcttttgccaaagagggaagtgtgtgtgtttttttaatagaaaatatggaccaaaaatttttttccctgaagaatgtattataaccctatttgtgtggttattacatcctgtgaaatgtatatatgttaaaataatgggggtgctggaaggtcatggcagactagctgctggttagtgtggaggggaagtggtttactttgtagagtttacatggttttatgcgcacactaattgtaataaactatgccaaacc

SEQ ID NO: 2376 - DNA, 1879 bp, Homo sapiens
ggcatggaggagcgcggcgattccgagccgacccccggctgcagcggcctgggtccgggcggtgttcgcggctttggcgacggcggtggagctccttcgtgggcccctgaggacgcctggatgggcactcaccctaagtatctagaaatgatggaattagatataggagatgccacccaagtttatgtagcgttcttggtttacctggacctcatggaaagcaaaagctggcatgaagtaaactgtgtaggattaccagaactccagctcatctgccttgttggtactgagatagaaggggaggggttacagactgtggtgcctacccccatcactgcttccctcagccataacaggataagggagatcttgaaggcatctcgaaagttgcaaggtgatccagatttgccgatgtcttttactttggccatagtggagtctgattctacaatagtctattataaacttactgatggatttatgctgccagaccctcagaatatttctcttagaagatgacatccatgtttcctgatgcttgttttattcatacaagattggatttgagacccatcagactgcttcatcttttatctcagaaatagggttgacgtacatagtgagggttgacttccccattccataaggttttcattctgaagagtaaaacttccccaggtagaagactttctccttcttaaaaaatatagggtgatttctttaaaactttgttatctagagacagtttaattacagttatatacaggtttatgcctaggatgtattcagatgggtgggacctgtgtgctgcttttgtcatcccacactcaaagttgtctctttgtttcttgctgccactgccagctcattgttgagactgccatttctttctcttactcagctctccccagtgccttttggccactgcagctaccgtagaatggcattttatatgtaccttgtcacccacttctgtttactttttcctctccagtaaaaagtaaaagatttctttcaattggtcttcccattgcagttactgttattcctcttttttggttaactttaaatcaaaactcaaaatatgttcatccagagtgtgtcttaagtaacttacgtgtcttaagtaacagggaccagagacatgttacctacaagagttctgggctatccttttcattcttatcacatatcatagcttgaatattacaacagtgtgggagagaatcaaccgtaaaaatgtcttcattaattagacccagttattccacttttgttaatgtctctcaaattgtacaaagtataaaaaattatatgcacaaagatgttccaagtgacattacttttagtagcccaaattataaaccactttaaagtttggggtaaagattggcaaactttttctataaagggccagaaagtaactattttaggttttaaacctactgtctctgtcataacttgtcaacactgctgtatgaagcacaaaagcagccatagacaatacataaacaatacgggcgtggctttgttccagtaaaactttgtttacaaatgtggtgccatagtttgtcatccctgggtctaggaaatagtcaataaacagatatatacaaatgatacataatgtacttattaaaaattagtaatgaatattattaaaaacatgaaaatattaccttaagtaaaaattgcaagacggaaaagtgtataagtgggtgtaatcatggctgaaataacagaccaagcatatgataaaaagataacaaagtaaatcaaattactaactggttatagtgggataggaggcagaaaatggatgactttgtcttttctcaatgtttttatttgtattttataataaaaatgttttaaaatt

SEQ ID NO: 2377 - DNA, 2839 bp, Homo sapiens
taatagaggtggtattttttgacttccatttgtgaagtttaaatgagattcgttattgttgcttttatgtgaatccttagtacatggcctgctgcaaacacccaggacaccgaggaaatggtcgttgctgtttgattttcctcatccccagtctcaaggggaagccaggccaatgagaagagccacttgccatcaggctgtccctttaggagtcactgaaagggccccagggtgggatggtggggagataagaaccacgagagaagttggcacaaaggagttatgggaaaaagggtccaagataggcagaaaagaagcttttgccagttgatgggggaagaaaggaagtcagagggcttagacagtgaggggggacagaacatctccatgtgcactctcatctcttgcagtcagcaacaggtatctacggggagggccgtgcatcctctactaccctggaggatctggaggtaagaggccctgggccgaggtgcagtgaccctgcaggccagccctccaacctcctcccacagcaggggcttgttgcccctctgccagctgaggcagcccacacacccccaccagccctaatgattattctctctacccctccccacaatcttcctccaactccttctctctgcatgcacctcagagccagtaccaagaactagcagtggccctggattcaagctccgcaataatcagtcaactcactgaaaacatcaattcactggtaagagtccagtggggtcccctgattacagctggtcaatcctggactccagtttcctcttggggccctgaagaaaggagctaggggcccctgatgccaagggcaaatggggagctgggcacccaggtctcacctggagggaccccagagcacagaacatgcagcatggctcttctgcactgccctctttgctgactctctcttctccagacacccctgctctagtccttgccacacatgccctggggttgtcacctctctgggaagcactagcctgactggttgtcaggggtccatatttctgccctgcctcagtccctaatttgctttttgagtctggacaagccatctctcctctttatgctcgtgtttctggaggaggtagagagtatcaaaggtctcggttagctctgaaagtcagagatttaaaggcccctagaatggaaacctcagggccaagggctcctgtctgtcctttgctgttttatatctctgctatgaagaactgtacctggcctgtacatgctcagtaaatgtttattgaatgaatgcacgtttctaaatcacaaactggcagaaggggggtgggcccttctcaaactctgtctctggaggttcaccagcccctccctccagggcccttttccccctttgctttgggcaggttcgcacatctaaggaggagaagaagcatgagatacatctggtacagaagcttgggaggagcttgttcaaactcaaaaaccagacggctgaacccctggccccagagcccccagcagggccatctaaggtagagcagctacaagatgagaccaaccacctaaggaaggagctagagagtgtgggaagacagctccaggctgaggtggaaaacaatcagatgttgagtctcctgaacaggagacaggaggagaggctacgtgaacaggaggagaggctgtgtgaacaggaggagaggctacgtgaacaggaggagaggctgtgtgaacaggagaagctgccagggcaggagaggctgctggaagaggtggagaagctgttagaacaggagaggcggcaggaggagcaggagaggctgctggagagggagaggctgctggaagaggtggagaagctgttagaacaggagaggcagcaggaggagcaggagaggctgctggagagggagaggctgctggaagaggtggagaagctgttagaacaggagaggcggcaggaggagcaggagaggctgctggagagggagaggctgctggacgaggtggaggagctcctggacgaggtggaggagctcctggagcaggagaggcttcggcaacaggatgagaggctgtggcagcagtagactctgcaggagctggagaggcagccgctccctccggggctcctcccatttatcccagtggctcaacaacttttttgccctccccttctcctccatggcttcccagcttgacatgtcttccgtggtgggggcaggggaaggcagagcccagactcttggagcagttgttccccctggggactctgtcagaggctccatggaggcctctcaagtccaagtgcctctggaagcctctccaattacattcccaccaccctgtgccccagaaaggccccccatcagcccagtcccaggcgcccgtcaagcaggcctctgagagtgctacccttctcttgtaaccttgcagccaacacccctgcccggcccctgagctgcctcctccagcccatgctcttacaggccctgcacagagtagcactcattaattcttggttaaggaatgaatcaacgaatgaatggctatgcatggacctctgggcagggagacctgggtcttctctggctgagaggggaaggctaaggcatggctgagattcaagccaccattccaggcctctttgcccaagaaagaaacttctgtcacccttgcactctcctgtgttctgagtccctggccaatagcacagccttccatgccccgacccccaccccaagcctctccactaggcctctgccaggatctaagcccatgagcacagggactggctatcccaagacctggcagatgtggctgctcaataaacacttgttgaacc

SEQ ID NO: 2378 - DNA, 2374 bp, Homo sapiens
gcaactcccggcgacccccgcgctcccgggtggcaagatggtggcgcgcaggacgaagctcgcggcgcgggacccggaggacggtatcccgagcccaccgtgctacgcagctattccaatcaagttctctgaaaagcaacaggcttctcactacctctatgtgagagcacacggcattcaacaaggcaccaagtccacctggcctcagaagaggactctttttgtcttcaatgtgcccccatactgcacagagcaggagagcctgtcctgcctccagtccacctgtggccttgtccagtctgtagagttgaaggagaagctggagctggctgggagtcaaggtcgaagttttttcatccaaagccagttccgggtttccaggtagcctacgtggtgttccagaagccaagtggggtgtcagcggccttggccctgaagggccccctgctggtgtccacagagagccaccctgtgaagagtggcattcacaaatggatcagtgactacgcagactctgtgcccgaccctgaggccctgagggtggaagtggacacgttcatggaggcatatgaccagaagatcgctgaggaagaagctaaggccaaggaggaggagggggtccctgacgaggagggctgggtgaaggtgacccgccggggccggcggcctgtgctccccctgactgaggcagccagcttgcgggtgctggagagggagagacggaagcgcagccaaaaagagctgctcaactacgcctggcagcatcgagagagcaagatggagcatctagcgcagctgcgcaagaagtttgaggaggacaagcagaggatcgagctgctgcgggcccagcgcaaattccgaccctactgagccgtgagagccgcagtggatggctggaggtgcagggccaggaggaacatgagtgtccaccaaaggagacagggctgggagcgctgcccggggcccaggtcctccctaatgacagcatgcacgaaagcccgcttcccacatctgattccaggagaaagagcggcgtgtccagcaagataagtttatccaccatctcggggaaggtacagaaaaactgtgaggatgccaaaaggggagaatgaatagggggaagaaggaaaggacactcccgcctttccctggggaccctggagttccccgaaacatcttttaggctggggggagggtgctgaccaagaggccagaggagaatcttctatctatggtgtgccttcccccaccacccctaagtctgcacccagcactgagctccagaccttggtgatggctggactccagggtgcggtgggaccgggtatgggggcgtggaaacatgaactctaccaggagtctccaccgtttacaccaacttcctggtataaggactgtcactgtgacaggaggaggcactttctgtcccaggtaccttctccttcctcctttgtgctcccctccccactccacccaagggagccccagttggccagacaaagccatctactcaccattccgcccacgacgccacctgggggacaaaagagctgtgggtgacattccctcactcccttcccagctgcataccctaaagcttcttcccaccagttgggggggggggcaccatatgggtggctgggggctcagcatctgggccatgatgtccccttcatcagacctgaccactcaaaagaccacatttccctcatccctgtgtcccttgcggcagttgcctgaggtcagagggtacagtggtcaacctctgactgaccctctcatctctctttgcagatctcataagtgcaggggaaaggggtggggcagcagctcctatccttccctcccagccctactccgggcccggtcagctcctggccactgtactcaccgaagctgtggcccagaatggagaatcgattccatttcaaggctggaaatgcaaggagccagaaggtccggctgggcacaggctcagcccacgatcttgcttctagtccccaggctcaggaaatcccttcccagcatctggggtgtccacccaggacactagcttgggggacccactggaggaagcgaactcttcaactttcccaagatctcccgtgaattgctggcagacctggggccagagcccaggccccactctcaggccagcgctgcttcctggatcctaccccgcctccagtgataagagggggtgccctagagcaccccccacaccgccgaaaatacacactctgtttcttacctgccacaactcttcggatctcactcacaaaagtctggaggtaatatgggacacctgggctgtaatgggacgagagcccatgacctccgaaatccatggcaacgtaataaaagtctgaaacag

SEQ ID NO: 2379 - DNA, 3190 bp, Homo sapiens
ttttcccctttgctccttggtttcctcccttccgtgatggggataataaagcctgtctgtctgactcacagggccgttggggtgtgttccaggtgttggtatgtcagctagcacgaattcgccgcccgctctgtgccaagccctgagttatacagcttcctattccatcctcaccacggtcctgcgaaggtgggcatcactcaaggctgcagtcgggcttagaggagctcagtgcacccgtccctgggccgcccacgggtatgggtggagatgtctcagcccacctgtaccgcgtccctgcgggcgggcagagctctgggtacagatgcatttgttttccagattctcacagtcatcctttaagacaagctgttctcattgttcagatgatggcatggaggcctagtggagttaagtgacttgctcaaagccatttagcctgtaagtgattggtcctggatttgaaggcaagtctgcctggaagtcctttggaagacttgaaaaggagaattggtaaagccaggggttcctatacctttcaggccttaagaaagtaatagtaggtgttttttttttttctctctgttccttatttcatgaaggaaattatacatttgcccaaatggcgcttcccttaatatttgctgaaccttaatgtttgcttttgattggcattatgccatcctagcacaataatatttgtcatctcataccttaggaaactctgcctgattttgaatgatacaaaaaaggttttggggtctaaatggagtgagaggaatggtaagagattaagtatccctcataaaaacaggatggtatcagtaagacctttcccaactctgagttcacattctaccacctcggtcacttaggtgtaaatgtcatcttcctcctcaagatgatgacaggccacccactaccctgggacaaaacagggcagacagtatacagcataggtccctctgctagaggaacattggtattcagtgctcttctgcttccaagaacccctcactccatgctactctccgagaatattgtaatggacatctgcctttgatatagccctgatacccaaccccactccgtcactgtgtttgaaaagtactcttcctgctgtacaaattggaaggctaggctgtgggcatatgggccggggcttggctagtcacacatgcatggaagctggtgatgcagaatgctggggggtggcgagttcatctggagactgtgccagcagccacatctagtttttgggggtggtcatggtggctcggcacctcctgctccagtgcccatgtccagtgctgacggtggtgatgcaggctctggcatcctcacactgggagtgtgagttgggctccagttatggcagcacagcataatgtcctgcccattttctgagcctggttctttggcttttctgggaatcagtgagatgccaaaggcctttaagtaaactcgatttaaatcagctgaagtctgtttcatctgcttaaagctaagaagctgacttttatagagatgttcctctgtagttatccaaacatttgtattcattcttctggcccctgaaagttctacttcacctgttaggcacctccgtgagctacagaattaacaggagaatcccaggttgagtgggtggcaggactgtgggctcagccgtctcccttcattattactgtgacccgggtctccatcatgccccctagacggtgacctctgtggggacacaactgagtccttcatctctatcctcagctccttgagtaatgcttggcacacctccgacttccgcacggatgactcccagcccccaacgctgggccaggagatcctggaggatatctccagcccagcagagatggccctctgcagtctagccgtattttgcgcttccaccattcttggctgtgacctggtccagctgggccctgaatgaatgtttgcttctcaggccagtattctcccctcctcaccaagccacctccacacagctctaaggaagctcccccaggtccaggcctcaggggagccctgccctcaggccgaccctactgccttttcagagccctccctgccctcctcggaagttgctgatgaacctcctaccctcaccaaggaagaaccagttccactagagacacaggtcgttgaggaagaggaagactcaggtgccccgcccctgaagcgcttctgtgtggaccaacccacagtgccgcagacggcctcagaaagctagcaccatcccggccctccgcctcctggccctgcctctatttattgcattctggttctggccgcgccgcgttgctggggtaagggcaagcactggggtcaagagcctgcacacatgagccttccgggctggaaggctggcgtaggacttggggctgtagcatcatcttcctgaccctggcacctgtgtctacttgctcccgagaagaggagcgctcatgtcttttttgcaccccaagttggctggagcatcggccaccccaagattcatctgtgacctccaggcagcagtctctgctccagaatctctggacggagctgctggcagcttctgcgagaagagagagatgtggaaggcaccttctagaagagagcgtgcctcaggttacttgaacttgaacggagactgtagactcccggactttcccctaggactgggggccctgtaggctgctgttggaggactgggtagagacattggagggaagggaagggcttttctccacacaagggcagagagtccgtctagatttcttgctgtcctgccagctctgcccatgcctgaggtggtcctacctctcacgggcaccctagctgctgacagccctttgtggccgccgtccccatcccctgccctcagcacacacatctgcacacacgcagctttgttctcacctctacctgtcattccagcatccctgcctcttgtcacaaactgccccagcaagaatttgaggttctgacaacagtacccatcccccacagtaccccttcagctcagtttctagaaagctcccttttctttgaaatctgcatgttgaattgaactttgtgattttattttttgtttcaaaaaagtttaagaaaatggaaatgggcaacagtgagtgaagacatattttagcactgaatagaatatttttaaaattaaactatttgaaatatg

SEQ ID NO: 2380 - DNA, 2308 bp, Homo sapiens
cagttggtacagctgtccaaagaaaatcctcagctactagatgcaggaattacaggatatttctttttccaagagaaagaaaaggagcttggaaaagccaagttgatgggtttctttgatttctttaagtacaagtatcaagtaaatgtggatgggaccgtggctgcttacagatatccatatctcatgctgggcgacagtctggttttaaagcaggactcgccatattatgaacatttctacatggcactagaaccttggaagcattatgttccaattaaaagaaatctgagtgatttattagagaaagttaaatgggctaaggaaaatgatgaagaagccaagaagattgcaaaagaaggacagttgatggctagggacctactacagccacacaggctttactgctactattaccaagtactgcagaaatatgccgagcgccagtccagcaaacccgaagtacgtgatggaatggaacttgttcctcagccagaagatagcacagccatctgccagtgccacaggaaaaagccttcaagagaagaactttgagtcagcccagaatcacactcctgtgtatcccggctacatctttaaggaaagattgaatctaagctgtgaaggacagtatagaagactgcaccaagtggactagttctcccggtggctttatatatgtagatggatatagcagtactggttgagtatccctcatctgaaatgcttaggaccaggagtgtttcaggcttcagattttttaagatttgggaatatttgcatgtacataatgaggtatcttggggatgagatccaagtctaaacacaaaattcatttatattttatatataccttgttcacataccctgaaggtaattttatataatatttttaataatttgtgcatgaaacaaagtttgtatacattgaactgtcagaaagcaaaggtgtcactatcttagcgacccaagtggtggtgtcagcactcaaaaagttttggattttggggtatttcagattttagatttttgtatgaggaatgttcaacctgtatttgaacaagcattaccaaatatcattgaatattaatatcttttgcgtaaaaactgctattatcagcatcatagtttctctaaaaagaaaacttggggatcatagccgatagagagacttgctaaaatataaatcagcctctgcaaaactgtttacatatttattggtttacatattttattggtttatttctatcccctgttcactttttctcttccacttccaattatgaagagaaaatatttgttcagggttgtccccccgccccccgtcactgcataatttctcctcttacaagctgcttttggctttcattaataacagcttccttttagaaggtctgataaggatatttaaggaagaagagaatgactctgttattaaaggtggcatggagactgtggagggaatattttttaaagcactactcatatcctttaaactaaattttgccaaagcccgagacaacattaaggagaaattgtaccttaagttagtaattccaaatctatctgagttgtatacccatcaaagacaatacagttattaacatagatgaaggtatgctataggcatcattcattatctctatattgaataggtgaaagataactgtagtcaggtgaaaggcattcattatttttaagctgaaaaggggatccttgaaaacactgaaaacctctacaacaatcttcaggaagcctgctatcttgggattcactaataataggccaagaacaaaggcaagcatccattcctcactccaccacttttctatttcagtgggtgtcgttgctacgatgaagactttggaaatttcctttctcttttaggacagggtcaggatttaggactcatagcctgaaagctcattacatactccttgtaaccatcagtccaaggttcagttcactaaagtgcatgttctaaaacaagagctatcctcattccaaattttaaaatatgtactctggtcggttgcggtggctcacgcctgtggtcccagcactttggcaggccgagatgggcggatcttttgaggtcaggagtttgagaccagcctggccagcatggtgaaaccccgtctctactaaaaatacaaaaattagccaggcatggtggcatttgcctgtaatcccagctactcgggaggctgaggcaggagaatcgcttgaacctgggaggcggaggttgcagtgagctgagattacaccactacactccagcctgggtgacagagtgagactccatctc

SEQ ID NO: 2381 - DNA, 1878 bp, Homo sapiens
gtcttcctcccaccctccctgagggtgaaagggccccacagagaccatcaggcatggatgctgaactgctgggaagggagctcaggctttttctttttagtccccaagagaagaattctttctcagatgtttttgtggttggagaatatttttgccattgctttgagaagacttcccctcctaactccccctctttccttggaatttccttccttaaatggaaagccttcaacattcactccaagctcgcccttttgctcccccaaggaaaaataacaagcaaacagaggtgcttgcccagtgtctctggaggggcttcccttagagggttgagttccagaataaattctacagcgggaccggtttcaagttcttacccttctccttcgagcatattcgggaagggaagtttgaagagtgagtccctgtgagggccgtgtgccccatgctaccctccccgcctccctccacagtgatcagctgtgcctctctgcctgttggttgtgatctgtgggcaccagctcattcgtgtcaccctgtctgtgagtcatttagatagaatagtcctccttgggtctcccaccacccctagctttgtgtgtagtgtagtgattttctggctgtcactcatactcactgggcaccagccttgccctcttagcctccatccatccagacagcccttcccacctcctggtggtgagccagtctgcattcccacgccatcccaaagccctttcatcttccccgtgcattgtagatggaaggagcacccatgccattcacatctagactttgagttccctgcatctgccaccgtagtttctagcaggagtagtggggggagtaatacagattcttccctagaaggggacactggtaacatgtcccactcttggattagcaggggtgggtccaggaagatgatatttgcgtcttttgcccacccccctggcattcagctggacccaactaggccatcatgagtggcttctccctgtcatccccaggggtcataggatatctacaccgcctttctgaccccaccctgcactcccatcctttcctctctccccgttcatgccctgcactacatagcacagccgggatgcttggaacagaggccttggctgctccgcagtgcacagggcttccctctctcggggttggcttcttcccaggccttgcatgggccctgcccacaagcacaccctcaggccgagggtgcagactgatgctcttccctgatggagaccctgagatcttccccacccccaatcatgatgtcttcagtgtgggactggggtcctcttggttctgcctgcagcctgcctggctccgcccctagtgccccctcctcaccacactggccccaggtctcaggaggggtgtcctgggcagggaaggtcagtgtcactgatggtttgctgtttggaagccattggcagggctgccgtgcatgtggctgtgagggctgcacagtcctgccaaggggcttcctccttgtcaccccgaaccttgtaatcgtgtgctggcgtggcagccctggctaagttaatccccaccgctttcagtggtagaaagaattccctgagtgggccaggctggtgccctcctcctaccctggcttttctgagtgagctgcctggagccctcatcccctctcccaggctgggctggccctgggcggggccactgtgtgctggcccactgtgacctgacccgaccttgtgcagcccccctgccctggtgtcctgggttttcgtgatgatctttgctctgtttccagtggggtttgaagcagagttcagggaaccctgcccaaggtcctcctgttcagacattcctatgttgaataaagtatgtttgacttccccg

SEQ ID NO: 2382 - DNA, 2928 bp, Homo sapiens
gtgagtgcgacaccccgccgagggaaggtcgccgagtgaggccgaggccgcgttgggggctccctggaagcggccccctagcctttctcgcatcggtggtggcagtcgttcctgcctgggggcgggaggtccaggatccttgttccggttaccgttggcgggtggaggacatttttcctccagatgtctgcttcccccacccctgaaccgttccttggcttccccatgccggaaatcctacttttacccctttggctgtctgggctactcgcctctttcggtaacttcaccctaggccttaagctcccggtagctgctcgccatgcggcgccctgaagcgtgaaccttcgtgggtcgcctctcggctgcttgggcgctccggttctgttgctttgtggtcccggggccaggccctgagtcgagtgcacctgtggtgggtgccgccaggtgcctggcggagctcctgggagagccccacgcggacctcgccgtgagctgcaggtactgctaggcaactagaaggaagccatgcccacgccgcaacatacttccctctccagtgtctgggtttcttgagtgtgggtacttccagtccgcctcctaactccagtctcttgaaaacacgggaggttgccaaaactcagccgcttccctggcagcgaggaggagttaccattgagcaggtagttccgcacgtgtcgactttggaaagatacggacattttctgtgtttcatgttctacttgaggcagcctgcttctgcaaagtggtacgatcgaagggactatgtcttcattgaattttgtgttgaagacagtaaggatgttaatgtaaattttgaaaaatccaaacttacattcagttgtctcggaggaagtgataattttaagcatttaaatgaaattgatctttttcactgtattgatccaaatgattccaagcataaaagaacggacagatcaattttatgttgtttacgaaaaggagaatctggccagtcatggccaaggttaacaaaagaaagggcaaagcttaattggcttagtgtcgacttcaataattggaaagactgggaagatgattcagatgaagacatgtctaattttgatcgtttctctgagatgatgaacaacatgggtggtgatgaggatgtagatttaccagaagtagatggagcagatgatgtaagtctaaaaattcttttttctgtttactttcatactattaaatagtaagaaacaacatatttacaaatggttttatatagattcacaattacttcttattttctaaaaaaaaagaaaagggaaaagcaatttttaaaatgtgcccatttttgacgaatgggggtatctattagggaactggttgtaccgtagaccattcctaaatggattagatttccaaagaatcattgtatagagacattatatattaataccgtactcaattataacagtcagtttaggccgggcgaggtggctcatgtctgttatcccagcaggccaggtgggcagagtacgtgaggtcaggagttcgagaccagcctggccaacatggtgaaaccctgtcttaaaaacttagccagacatgatggcaggtgcctgtaatcccagctactggtgagctgaggtgggagaatcgcttgaacccgggaggcggaggttgcagtgagccaagatcacaccattgcactccagtgtgggcagcagagcgaggctccatctcaaaaagaaagaagagagtcagtttataggattcacaagacagtgatgatgaaaaaatgccagatctggagtaaggaatattgtcatcacctggattttgagaaagaaaaataacttctctgcaagatttcataattgagagaattcctgagttgatagctctaaaggcagatatgctgtatttgcctactttaacccatttttcaacctgtttgttttttaaaaggcttcactaagggttgatatgtaccattgtatggggcaattttaagtcagctaaggcaataaccttatgcatgaacatttcccagactttcatgaagctgttgaggtcctaggcaattaatgcagcagttgcgataaataaaaacatctcacctaggtctccttttcttcataacatagatactgacatgataggaagctctcagcttagggaaagagaataaattttagattatagaacatggattcaaaagtgactggaacaaattggctgacaccttactggtaacctgctattcttctggtgttatccttcaggattgttccactaaaatttatttttcaaaaaatttacttcacattattctatgtaagtgatgacttgtcagtgttccaggtgtatcttagctaaaactagagaatgccctaacttagatggtttttgaagcctatacaattggtattgtttgacccttaagcttttacatctcttagcatggaggacgaagaaagctgtacattgttgcttgagagtctgtacatttagtccagatttgtatttgcactgtcagtatggcaaatgagtgaaaaatgtttaatacactattggattttttatttcctttttttgattcagcttatacccgggctgaaaacctcaatttatgttcatgacagtggggatttttttaaatgtctacattctttctaataaactgttggaagacttcttggctgtccttttaagtgtctggcttactgtaatttttatgtatttaccatttactggaatggagtttatttgaggaagaatttgggattattcctctgtttgaaaaaagaggcttgctgtaatgtcacaggaaaccttttaaaagtggatctgtaatagcatattgtagatgcactttgcagcagttggaaaagaaagtgttgtgtgatttgattgaaataaaactaaatgtgttgtcctcct

SEQ ID NO: 2383 - DNA, 2128 bp, Homo sapiens
aacattatacagacttgggtttgaaatccacgtatgaccctggcccgttggcctctctgagcccggcttcttcctctacaaaatggagatcgcaaccgtccccacccgatagcgagagggcgcacacccgcattccaggctggacgggtctctgggcagcgggctcctccccgcccagggcgcatgccctgccctcccctcctgtctgtccctgtccgggctgcaggagagcaggacagatgggtcagggaggaggtgacatggggagggggtcctacagtcacaggtgggtgggggtggagggcccacctgagatcagtgtcgcccccaggcgtcctgttcagcatcgaggtcatgtcttcccacttctctgtctgggattactggaggggcttctttgcggccacctgcggggccttcatgttccggctcctggcggtcttcaacagcgagcaggagaccatcacctccctctacaagaccagtttccgggtggacgttcccttcgacctgcctgagatcttcttttttgtggtgctggggggtctctgcggcatcctgggcagcgcttacctcttctgtcagcgaatcttctttggcttcatcaggaacaataggttcagctccaaactgctggccaccagcaagcctgtgtactccgctctggccaccttggttctcgcctccatcacctacccacccagcgccggccgcttcctagcttctcggctgtccatgaagcagcatctggactcgctgttcgacaaccactcctgggcgctgatgacccagaactccagcccaccctggcccgaggagctcgacccccagcacctgtggtgggaatggtaccacccgcggttcaccatctttgggacccttgccttcttcctggttatgaagttctggatgctgattctggccaccaccatccccatgcctgccgggtacttcatgcccatctttgtctatggagctgctatcgggcgcctctttggggagactctctcttttatcttccctgagggcatcgtggctggagggatcaccaatcccatcatgccaggggggtatgctctggcaggggctgcagccttctcaggggctgtgacccacaccatctccacggcgctgctggccttcgaggtgaccggccagatagtgcatgcactgcccgtgctgatggcggtgctggcagccaacgccattgcacagagctgccagccctccttctatgatggcaccgtcattgtcaagaagctgccatacctgccacggattctgggccgcaacatcggttcccaccgcgtgagggtggagcacttcatgaaccacagcatcaccacactggccaaggacatgccactggaggaggtggtcaaggttgtgacctccacagacgtggccaagtatcccctggtggagagcacagagtcccagatcctggtgggcatagtgcgaagggcccagctggtgcaggccctgaaggctgagcctcctccctgggctcctggacaccagtgtctccaggacatcttggctgcaggctgccccacagaaccagtgaccctgaagctgtccccagagacttccctgcatgaggcacacaacctctttgagctgttgaaccttcattccctctttgtgacgtcgcggggcagagctgtgggctgcgtgtcctgggtggagatgaagaaagcaatttccaacctgacaaatccgccagccccaaagtgagccggcccagcaagatgaaacagggcaccccagctgacctggtactgaggttgggctgagaccctgcttctcttcccccatcaccacctgcccctccctccagcccagctccattctttggcataacaggcaactttaacctagcccagaagaggatggctcatcctgggtgggacgatggctcctgccttgaaagacaaaaatcccaccttgggcagagctgagtgtgagaagatggaaaaccagtatctgccaggtgctcagtgactggccatcacattaatgaatgatgagattggagtacactgtcaccaagggcaggcacagatgccttctggggttgtctggttcccagtgagaggctcctgagaaaaataaagctggttcccag

SEQ ID NO: 2384 - DNA, 2227 bp, Homo sapiens
attaaaacaagactgcaggaggaagggcatactaagacggaaagctccaagtcctccactcatctctggcaaagccaggtccacaggatgaatggaagaggctgcctccagtttgctagtttcccttacccagtggctcccagaagatacacagtctgggtggagactctggctaaaggggcataggaacacagccataagaaaatgtcaggagacatcacaaaaggatggccaaccctgtccgcttattttcccactggtctatttctgggcatttttgcagactctgcagttgaataaaatgctgaagtctgatggccgatttgttgatacatgcaacagatacgaggtaagtgagccttcagttcttcaaattcataaatttctactacatcagaggagacaatgaatcagatgatactatctttcagggcagagccacatgattcctctgtatacccaaggttgagtgctaacatacagcaggggcacgttaaatatctatagattggcaaaaagagatttgaaccccttttcctgacattagattattattgagtataacacaaaagctgttaattatagggcctccaaaaaccatgctttgataaggttcagaacaatctctgagaggctgttggaaggataaaagcaggctctaggacctcccacaaatggaggagctgcactgtttttttctgttctatatgctgagattctgttcttctattaaacaagattgaaaactgctgctgtagacaaacatagcccagactatggcttaaatatatagagaagtgtcaaagggaaaaactaaaaaaagatagccagtaagttccaaatattgtattttaaaggctggtgcaatgctaccatggaatcaccagtggtgggataggcacagatacaggatgaaaatagagaaactaagggattaggctgggtggatggaaaaaagaaatgtctgcaagttccaaaccttccacttctcttgggcagagcagaggtccacaggacaaattttgcaagaggctgcctccaagtgatctttggagtagtcactttgtaaaaactttaaaggaaaattcactctgaaatgaggtatgtctgaagagaacaaattacaaaatggaatgtatcaagatatcatgaaggattttaccctctaatttcatgtaccatcttaatttccctatatgaggatatatatcctctaatgtggctctgtctttacaccttagaaccagttcctcatctccaatcaaagctccactcaacccacaagacttaactcatgttggctaagatattgatgttatggctacacaggtccctccgctctccaatcatccgacatagggctgcttgtgcctgaatccaagggcaattgtgtgtgaccactgccctttaaacctcaccatacatatctcaacacttgttcctgagcatgcttgcatgagacaggatgttgctgaggtcaaagtgtccaaaatatgaggcagaacctaaaggaggatatgaaaaattcatctgtggacacactcaccggaatcccattgatgccaagaaagccaggaactcccatgggaccctaaaaaaaggagtagggagaggaatgtaagacacaatccaactgatgtttgttagactcagtaggtttatgagagtcaatggcctacatttttaagaagtgtttcgtacccccctccccatattgtattcccttgattcctactgcagttcgaagtgaccatttacctctacctaaggccttagacaggtctttgttccgaaaccagctcttttttttaagggagtatagtcgaggttttaaaattaaggcttactattacctgctgccatctggggaaaactggagaaccttgaatgtcctaatcacaagtttccctctccattatgcttctacagataaggtcccctagccgaacaactctccttatcaaatggaccaggtgcaattcctgcttatcctggaatagcagtttcaatttcttgctggcctactggactattcaaacaagccaattgcatccaccttcaggaaccaggggcaccctgccctactgatactacaaagtctgctttgcacagccttttcttctaaactctgttcccaagtgctatccctatgtggccctatgtggtgtgtggtatcttcctcccctgagctgtgagtatatgtgactaataaattgctgtcaacttc

SEQ ID NO: 2385 - DNA, 2752 bp, Homo sapiens
aagacgagtgcaccatggccaccgcggcaacctcacccgcgctgaagcggctggatctgcgcgaccctgcggctcttttcgagacgcatggagcggaggagatccgcgggctggagcgccaggttcgggccgagatcgagcacaagatctggagctcgatggaagcctctcagtgtctccacgccacacagctctacctgctctgctgccacctccacagcctgctccagctggattcttctagttcccgatacagtcccgtcctctcccggtttcctatactcatccggcaggtggcggccgccagccacttccggtcaactattctgcatgaaagcaagatgttgctcaaatgccaaggtgtgtctgaccaagctgtggccgaggccctgtgctctataatgctcttagaagagagttctcctcgccaagccctcacagacttcctgctggccagaaaggcaactattcagaaacttctcaaccagccacaccatggtgctggtatcaaggctcagatttgctcattagtggagttgctggccaccactctgaagcaagctcatgcccttttctacactttgccagaaggactgctgccagatccagccctgccatgtggcttgctcttctctactctggagaccatcacaggccagcatcctgccggaaagagcactggtgtcctgcaggaagagatgaaactctgcagctggtttaaacacctgccagcatccatcgtcgagttccagccaacactccgaacccttgcacatcccatcagtcaggaatacctgaaagacacgctgcagaaatggatccacatgtgtaatgaagacattaaaaatgggatcaccaacctgctcatgtacgtgaagagcatgaagggtctcgcgggaatccgggacgccatgtgggagttacttaccagtgagtccaccaatcacagctgggatgtgctatgtcggcggcttctggagaagccgctcttgttctgggaagatatgatgcagcaactgttccttgaccgattacagactctgacaaaagaaggctttgactccatctccagtagctccaaggagctcttggtttcagctttgcaggaacttgaaagcagcaccagcaactccccttcaaataagcacatccactttgagtacaacatgtcgctcttcctctggtctgagagtcctaatgacctgccttccgatgcggcctgggtcagtgtggcaaaccggggtcagtttgccagtagcggcctctccatgaaagcacaagccatcagcccttgtgtacagaacttctgttctgccctggattctaagctgaaggttaaactagatgacctcctggcttacctcccctctgatgactcatcactgcccaaggacgtttctcccacacaggccaagagttctgcctttgacagatacgcagatgcggggaccgtgcaggagatgctgcggactcagtccgtggcatgcatcaagcacatcgtggactgcatccgggcagagctacagagcattgaagaaggtgtgcaagggcaacaggatgccctcaacagtgccaagctgcactcagttcttttcatggccagactctgccagtccctgggagagctgtgcccccatctgaagcagtgcatcctgggaaaatcagagagctcagagaaaccagcaagggagtttagggctctgagaaaacagggaaaggtgaaaactcaggaaatcattcctacacaggccaagtggcaagaggttaaagaagtactcctccagcagagcgtgatgggctaccaggtctggagcagtgcagttgtgaaagttttgattcatggattcacccagtcattacttctagatgatgctggctcagttctggccacagccaccagctgggatgagctagaaattcaggaggaggcagagtctggcagcagtgtcacatccaagatccgactccctgcacagccgtcctggtatgtacagtccttcctgtttagtttatgccaggaaattaatcgggttggaggccatgccttgccaaaggtgacattacaggagatgctgaaaagctgtatggttcaagtagtagctgcctatgagaaactctccgaagaaaaacagattaagaaagaaggtgcatttccagtcacccagaaccgggcgctgcagctgctttatgatctgcgttacctcaacattgttctgacagccaagggtgacgaggtgaagagtggccggagcaagccagactccagaattgagaaagtgactgaccacctggaagccctcattgatccatttgacctggacgttttcacgccacacctcaacagcaaccttcatcgcctggtgcagcgaacttctgttctgtttggattggtgactggtacagagaatcagctcgccccccggagcagtacgttcaactcccaagaaccccataacatcctgccactggcatccagtcagatcaggtttggacttctcccactgagcatgacaagcactcgaaaggctaaatcaaccagaaacatcgaaacaaaagctcaggttgtccccccggcacgctccacagctggtgacccgacagttcctggctccttgttcagacagcttgtcagtgaagaagacaacacgtctgcaccttcattattcaaacttggctggctctctagtatgactaagtaacatggcaacacatctgtctctccctaaataaatactaccacattatttcttct

SEQ ID NO: 2386 - DNA, 2333 bp, Homo sapiens
aggcgagccgggcgcccaggacagtcccgcagcgggcgggtgagcgggccgcgccctcgcccctcccgggcctgcccccgtcgcgactggcagcacgaagctgagattgtggtttcctggtgattcaggtgggagtgggccagaagatcaccgctggcaaggactgggttggtttttggagtagtccctgctgacgtgacaaaaagatctctcatatgatattccgagtcagtgccgaggggagccaggcctgtgccaaaggctgtgagctctgctctgaagtcaacggctgcctcaagtgctcacccaagctgttcatcctgctggagaggaacgacatccgccaggtgggcgtctgcttgccgtcctgcccacctggatacttcgacgcccgcaaccccgacatgaacaagtgcatcaaatgcaagatcgagcactgtgaggcctgcttcagccataacttctgcaccaagtgtaaggagggcttgtacctgcacaagggccgctgctatccagcttgtcccgagggctcctcagctgccaatggcaccatggagtgcagtagtcctgcgcaatgtgaagtgagcgagtggtctccgtgggggccctgctccaagaagcagcagctctgtggtttccggaggggctccgaggagcggacacgcagggtgctacatgcccctgtgggggaccatgctgcctgctctgacaccaaggagacccggaggtgcacagtgaggagagtgccgtgtcctgaggggcagaagaggaggaagggaggccagggccggcgggagaatgccaacaggaacctggccaggaaggagagcaaggaggcgggtgctggctctcgaagacgcaaggggcagcaacagcagcagcagcaagggacagtggggccactcacatctgcagggcctgcctagggacactgtccagcctccaggcccatgcagaaagagttcagtgctactctgcgtgattcaagctttcctgaactggaacgtcgggggcaaagcatacacacacactccaatccatccatgcatacacagacacaagacacacacgctcaaacccctgtccacatatacaaccatacatacttgcacatgtgtgttcatgtacacacgcagacacagacaccacacacacacatacacacacacacacacacacacacctgaggccaccagaagacacttccatccctcgggcccagcagtacacacttggtttccagagctcccagtggacatgtcagagacaacacttcccagcatctgagaccaaactgcagaggggagccttctggagaagctgctgggatcggaccagccactgtggcagatgggagccaagcttgaggactgctggtgacctgggaagaaaccttcttcccatcctgttcagcactcccagctgtgtgactttatcgttggagagtattgttacccttccaggatacatatcagggttaacctgactttgaaaactgcttaaaggtttatttcaaattaaaacaaaaaaatcaacgacagcagtagacacaggcaccacattcctttgcagggtgtgagggtttggcgaggtatgcgtaggagcaagaagggacagggaatttcaagagaccccaaatagcctgctcagtagagggtcatgcagacaaggaagaaaacttaggggctgctctgacggtggtaaacaggctgtctatatccttgttactcagagcatggcccggcagcagtgttgtcacagggcagcttgttaggaatgagaatctcaggtctcattccagacctggtgagccagagtctaaattttaagattcctgatgattggcatgttacccaaatttgagaagtgctgctgtaattccccttaaaggacgggagaaagggccccggccatcttgcagcaggagggattctggtcagctataaaggaggactttccatctgggagaggcagaatctatatactgaagggctagtggcactgccaggggaagggagtgcgtaggcttccagtgatggttggggacaatcctgcccaaaggcagggcagtggatggaataactccttgtggcattctgaagtgtgtgccaggctctggactaggtgctaggtttccagggaggagccaaacacgggccttgctcttgtggagcttagaggttggtggggaagaaaataggcatgcaccaaggaatcgtacaaacacatatataactacaaaaggatggtgccaagggcaggtgaccactggcatctatgcttagctatgaaagtgaataaagcagaataaaaataaaatactttctctcagg

SEQ ID NO: 2387 - DNA, 1963 bp, Homo sapiens
catgctgaaccctggctccgccagcagcctgctgcccctcagccacgatgacgtgggtgcccccgtggagccgctgcccagcaacggcagcagcagccctcctcgcctctccccgccccagtacagccaccaggtgcaggtgaaggaggagccagcagaggcagaggaagacaggcagcccgggcctcccctgggcgcccctaaccccagcgcctcggggcctccggaagacagggacctggaggaggagctgccgggagaagaactgtcctaagggcctgtagtgaccggcggggctggggtgagacccctcccttccagaatccaggccccatctcccccaactccacagcccctcccgagcctcaaggcaagtccaggactcagaccggggaggcccgggccagcagctcccagtgtgacctgacaaaaacacgtaggggcagggacggtccccacccccagggacacaacccctggtcttggaccagtagaggacacggagggttcagacccctcctcagaccctccccacatctgaaactgcctccccccaaccaccagcagcagcagggccctcctcccccaccagctctccccacagggcccctcagcatcatggagacccgcaggcggggcttagccacccctcaaacccagggccccctggcacctggctctggccgtgttttctggccagaggcccccactttcctaactcgtgctcccttccgccttcttttccgtactgtgaagaaagaactctccaccccagctcccaccctgccctggcctgggtggaggaactgtgcctccatccccagaagaaacagccccctctgctgctggggtgggactgtctgtgtgccctgtgggggtccgtgtgagcaggcccacctggctccagacccgcccccaacctgagacagaaccaggctgagccaggcctccacccccacccccgtttgctgggggctcctccagccgcccccatgggaagaggcctggtaccgcctcacccacagaggtctgtgccaggtgcgcttctgcaggtggagccaagctctccctgaggccagaggcggggcctgggccgggagcccaggggaaggccaggctggaccccggctccacacccacatccagcctgcaggcctctctgcagtcctctcaccctccctcagctccccttcctctgcagtcaccctcagctccccttccttgcccgcctctccccccgccgccccaccagttaaacggatgaccaaagacctttcttatgccggaagcaaaaaccaaaactttttgttggctttttcctttgtcgcctccccagcacctgccctcccagtctcccaccccggccccaggctggaagccctccctccacttaagttattgttttaaaccaaagtttacagtgtctgttggtggccaagaccttctctctccacccctcctccatccaccctgaggaccctggggctcagtggaggcagggccctgcccccctcccttccgctcctgcccagcctgggggaaggagaaaggaggggagaaagcgggctctcaccccctcaggagtgggcacgggagcccttctccctgaccctgggctgcttcctgggggctctccagacccctctctaggaccaagtcacccgtcgtgctgggagtgtggattctagcaaaagagctggaaaaaagtcagactctccacagaccccctatgggggacccccaactcaaggccaaggactgggcgtatcggatgctcataacacccctggcctggcccctttactgagaagactccttggatatttcccaagaaccccccacatacacccctcacaagccacccctcctgagaggcagggggccctccgccccctccccatgtattccccacctgtgttccgtttgaccagcacagaaatattaaacgtcctctattcaccgg

SEQ ID NO: 2388 - DNA, 2294 bp, Homo sapiens
tggcgcatatggtattctaaatattactggaagtaacagggatgctctgtagatccccaacaatacttttgagaagcagttgctgatatatttttccattcagtggaaacctatccgagcaaatttcatggttgcactgatctcttaacaatatgtattaccatgcttctccactaaaatatgtctgtaaggaagtacccagtacagtatgtctgtaaggaatattccattaaaaggaatatagtgtcgctgtcaattacatttttttttcttttgagatggagtcttgctctgttgccaggctggagtgcaatggtgcaatctcggctctcccgagtagctgggactgcaggtgtgcgccaccgcgcccggctgatttttgtgtttttagtagagatggggtttcaccatgttggcgggatggtctccatctcttgacctcgtgatccacccacctcggcctcccaaagtgctggtattacaggcgtgagccatcacgcctggcctatttacatattttcattaaactcaattttcagagtcattttcagagcacatggatgatagcaagcaagaatctaccaccagtaaagaagaggaaacaaatattataagttccatagttccttcaacacaagatatttatcagcggcagaactcttcagaccttcataaatctctgttgcctgcagtggatgaaactacatgtggtcacacacactttcagcaaatgatagacaagtacattaatgaagcaaatttgatacctgaaaaaacagatttgcaagaattggaacacatttttcctaatttgcatcatcagctgtttaaatccttagaaccacatccagattttgacttatcatcatcatcctctgggatttctccagacaacagagacttttaccagagatcagattcttcatctgaaagccactgtgctactggattatccaaaagtacagtttatttcacagcactgaggaggaccagcatgcattcttctcttaacacaagtccgaatcaacaacctgacactaacttggctcatgttggagctcacagttttgctacagaaaatattattgggggatctgaacaatgttttgaacagcttcagccagaatattcttcacaggaggagagccagcatgctgatctaccaagtatttttagcattgaagcaagagattcttcccaaggcatgaaaaatcagaactatccctctgaagaacatactgaaatattacaaaacaagaaaaaaattgttcatttccagctttctataggaaacttaagttcagtctacagttcatctgatgaagctaatgtatttgatcagttaaatgtacagcatagcactccatgtggttctaactctagtgagtgctcaacaaaacaccaactagaaagcagaaaggaaggtatgggctttgaagaactatcaaaaagaggggttgttacaatgttacgaagtcaaggactcattgaagataataaaaatgaaacctgtagggttttagacataaatccacaggtagaggaaactgactctcgattatgtgtaaggacagtggagatgggaacttcaattcaggcaccatattccttaactactcaaaatgaaaaatattttgagaattcagctgaaacagacattccaaaaatcaccaaaaaactatctcaactaggagaatcagagctttttgcaagttctggatcattttcattacagagctctataccagtctgggaaacagaaactggccatggtataatggaagaaccagaacttactttaataagcaccactgataccagtattgctgaaatggattttgcaaatttaaccctagaagagaagagcgagaatgaagcaaaatgcttctttcaggtgagtgtgtttctgcctcttgtatcagcaacagaagcctcagattatccagctgtatcagaactttccatagaaaaaccaaggacagcatctacagcagaaacccctcgcaggcttacacctgtaccagggagcttacaagaagcatttataaagaggaaaaaatcatttatggagagatcccaccagaggcagaaagaaataaggaataaaattcatgtctctgaaaattctcaaatcaaaacagttaaagagaaaccatctataagttcatctgtgagtcgtctaaagggcgtgaataaggtcagagcatcttttcctgaagacagaaagactacacaggctctaaggcaccaaaggggtctaaggttatacaatcaactagctgaagtgaaacaac

SEQ ID NO: 2389 - DNA, 2622 bp, Homo sapiens
caatagatgcagaaaaggcttttgataaaattcaacatcgcttcatgttaaaaactctcaataaactaggtattgaaggaccatgcctcaaaataataagagccatctgtgacaaacgcacagccaacatcatactgaatggacaacagctggaagcattccccttgaaaaccggcacaagacaaggatgccctctctcaccactcctattcaacatagtattggaagttctggccagggcaatcaggcaagtgaaagaaataaagggcatccaaattggaagggaggaagtcaacctatccctgcttgcagatgacatgatcctatatctagaaaaccccgttgtctcagcccaaaggcctcttaagctgataaacaacttcagcaaagtctcagggtacagaatcaatgtgcaaaaatcactagcattcctatacaccagcaacagtaaagccgacagccaaatcagcaatgaactcccattcacaattgctacaaaaagaataaaatacctaggaatacagctaactagggaggtgaaagatctctacaaggagaactacaaaccaccgctcaaagaaatcggagatgacacacaaaaaaatggaaaaacattccaagctcatggataggaagaatcagtattaaaatgggcatactgcccaaagcaatttatagattcaatgctattcccattaaactaccattgacagtcttcacagaacgagaaaaaaaaaactattttaaaattcatatggaaccaaaaaacaaaaaaagcccgaataccgaaggcaatcctaagcaaaaaggacaaagctggaggcatcatgctacctgacttcaaactatgctacaaggctacagtaacccaaacagcatggtgctggtacaagaacagacacatagacaaatggaacagaacagagaaccgagaaatgagaccacacacctacaactaactgatcttcgacaaacctgacaaaaacaagcaatggggaaaggattcccggttcaataaatggtgctgggataactggctagccatgtgcagaagatgaaaaccggctcccttgcttacactatatacaaagattaactcaagatggattaaagactgacatgtaaaacccccaactatgaaaactctgaaagacaacttaggcaatgccattcagggcataggcatgggcaaagatttcatgatgaagacgccaaaagcaattgcaacaaaagcaaaaaattgacaaatggggtctaataaaattaaagagctgtgcacagtgaaagaaactatcaacagagtaaacagacaacctacagaatgggagaaaatatttgcaaactatgcatctgacaaaggtctaatatccagcatctataaagaacttaaacaaatttacaggaaaacaaacaatcccataaaaaagtgggaaaaggacatgaacagacacttttcaagaggagacatacatgcagccaacaatcatatgaaaaaaaaaggtcaacatcactgatcattagagaaatgcaaatcaaaaccacaatgagatcccaactaatattagccaaaatggccattattaaaaagtcaaaaaataacagatgctggcgaggctgtggagaaaaaggaatgcttatacactgtctgtgggattgtaaacaagttcagccactgtggaagacagtgtggtgattcctcaaagacctaaagacagaaataccattcaacccagcaatcccattactgggtctacacccaaaggactaaaaatcattctgttacaaagacacatgcatgtgtatgctcattgcagcactactcacaatagcaaagacatggaatcagcctaaatccccaacagtgacagactggagaaagataatgtggtacatatacaccatggaatactatgcagccgtgaaaaagaatgagataatgtccttcgcagggacatggatggagctggaggcccttatccttagcagaccaacacagaaagagaaaaccaaatactgcatgttctcacttataagtgagagttaaatgatgagaacatatggacacatagaggggaacaacacacactggggccttttggaggatagagggtgtgaggagggagaggatcaagaaaaacaactaatgggtactaagcttaacacctgggtgatgaaataatctatgcaacaaatcccctatgacacaagtttacctatgtaacaaacctgcacttgtacccctgaacttaaaagtttaaaaaaaaaaaaaaaaaaggagttagtggctaataaactctaaataaagcatttcaaacttaaaagcaaaatctagccaggtgccgtggctcacgcctgtaatcccagcacttttggaggccaaggcaggaggatcgcttgaggtcaggagtttgaaaccagcctgagcagcaaagcaagaccccgtttctacaaaaaaatagaattaaaagaaaagttagttgggtggagtcatgagtgcctgcagtcccagctactcgggaagctgaggtgggaggatctcttgagcccagcagttcaaggctactgtgagctatgatcacgccactgcactccagcctgggtaacagagcaagaccatgtctc

SEQ ID NO: 2390 - DNA, 2063 bp, Homo sapiens
tgatgtcaccacgggcctcgtggagcattcgtactttgagcgtccacaggtggcttctgtgagaagtgttcctcgggggtgcagcgggagcatgctggaaacagcagatggtgtccctgtgaacagcagagtgtcctccaaaatccagcagcttctgaacaccctgaagaggccaaagcgccctccactgaaggagttctttgtggatgattttgaggaattgttggaagttcagcaaccagatccaaatcagccaaagcctgagggaagcgagacgagtgtgctgagaggggagcctctcactgcaggtgtcccccgaccgccgtcgctgttggccaccttgcagcgctggggcacaacacagcccaaatccccctgtctgactgccttggatacaactgggaaagccgtctacactctcacctatggtaaactttggagtcggagtttaaaactagcttatactctacttaataaactgacaagtaagaatgaacctctacttaaacctggagacagagtggcgctcgtgtttccgaatagtgaccctgtgatgttcatggttgcattttatgggtgtctcctggcagagctggttcctgtccccatagaagtgccattaacaagaaaggatgcaggcagccagcaggttgggtttctgctgggcagctgtggagtcttcttggccctgaccacagacgcttgtcagaaaggcctccccaaggcacagacaggagaggtggcagctttcaaaggttggcccccgctctcctggctagtgattgatgggaagcatctagccaagcccccaaaggactggcaccctctggcccaggacacagggactgggactgcctacattgagtataaaaccagcaaagaaggcagtacggtgggggtcacagtgtcccacgcatccctgctggcacagtgccgggctctgacccaggcgtgcgggtactcagaagctgaaacattaacaaacgtgctggatttcaaaagggatgctggtctgtggcatggcgtgttaacaagcgtcatgaacaggatgcacgtggtcagcgtcccctacgcgctgatgaaggcgaacccactctcctggatccagaaagtgtgcttctataaagctcgggccgcgctggtgaagtcgcgagacatgcactggtctctcctagctcagcggggccagagggacgtcagcctcagctcactgcgcatgctgattgtggccgatggtgccaacccgtggtcgatctcctcctgtgacgccttcctcaacgtcttccagtccagaggtctgaggccagaggtcatctgtccttgtgcaagttctcctgaggcgctgactgtcgccatccgcaggccacctgatctgggaggaccacctccaagaaaagcagtcctatcgatgaacggtctaagttatggtgttatcagagtggatactgaagaaaagttgtcagtccttactgctcaggacgttggtcaggtgatgcctggagctaatgtatgtgttgtgaagttagaaggtaccccttatctttgtaaaactgatgaagtgggagaaatatgcgtcagttccagtgcaactggcacagcgtactatggattgcttggaatcacgaagaatgtgtttgaggcagttccggtcaccacaggaggagcacccatctttgacaggccattcaccaggacaggcctgctgggcttcatcgggcctgtgagtatgtcctcctgtaccagcactggcagtcagagaaggtagggggtgtggctaagggacacctcgttgcagccccacccttgtcctggccgttcctgacctcccatgtggccttggtcggtggcgctgacctccctgcccatcaccctacctgtgtgcagggccatccacacctccgagactggtgcacagtcctgcacacaggcctgagtcgggggtccccggggtggatgaggatgttttgctttttatatggagtggcaggtttgtgagtattcattatatcattctttaccattttggatgtctaaactattcaaaaataaatgcttctatttgt

SEQ ID NO: 2391 - DNA, 2380 bp, Homo sapiens
tcggccaccgctcgcttcaatatggctgcccccagggagagacgaggctaccatgaaggagccgagcgcagaccctgagtccgtcacccatggatcgcagcgcggagttcaggaaatggaaggcgcaatgtttgagcaaagcggacctcagccggaagggcagtgttgacgaggatgtggtagagcttgtgcagtttctgaacatgcgagatcagtttttcaccaccagctcctgcgctggccgcatcctactccttgaccggggtataaatggttttgaggttcagaaacaaaactgttgctggctactggttacacacaaactttgtgtaaaagatgatgtgattgtagctctgaagaaagcaaatggtgatgccactttgaaatttgaaccatttgttcttcatgtgcagtgtcgacaattgcaggatgcacagattctgcattccatggcaatagattctggtttcaggaactctggcataacggtgggaaagagaggaaaaactatgttggctgtccggagtacacatggcttagaagttccattaagccataagggaaaactgatggtgacagaggaatatattgacttcctgttaaatgtggcaaatcaaaaaatggaggaaaacaagaaaagaattgagaggttttacaactgcctacagcatgctttggaaagggaaacgatgactaacttacatcccaagatcaaagagaaaaataactcatcatatattcataagaaaaaaagaaacccagaaaaaacacgtgcccagtgtattactaaagaaagtgatgaagaacttgaaaatgatgatgatgatgatctaggaatcaatgttaccatcttccctgaagattactaagctttggttctgatgtgtcttggccgtaatgtttctagtaggttttataaagctgctcttcataagagtattttagtttgttgagtgtatcagccattcataagccagtaatgacaagtgcagagcttcaaactataactttgttgcccagaggatgtgcagttgtcatctaagctctcagcagtacccggcttatcctacgacttcacctgaaatgctatagttatccctacttttttaccagtttctcccagaagcacctgcttaataaatcaaagatgtttgaatggtgtcttattctgaaataacctgacctaagacaggtatttagattattttggatacattttgaaaagggatagcataaatattttaagtaaaaagacctttattttaaataatagtggatattttaatgctggaaattagcattatagttgatatgccagaaattatatctttggttgtgatttaaacttatgctataaactaaattaatgatgtaaatacatagttttaaacattcttttagggacatgtaacttttaagtatcacttcaataatacgtattattataggaacaaagatttgggaataattgattacaggtgaggaagtactggaattccagttcaaggagataccatttcatttaggactaaaaggacaagatacaagttcacatgatgggaaaaatcagaaaacctctcgcagacaaagggtatataatggatatgaggcatcaaaaagcatggtatagtcagtgatggggaatagtccagaaaggctgaaacacagcatgtgatgcgagtcaaggtagttgatgcccaactgtgaagggccgttctaatctagcatggaggtagacagtgtttccttaatatggctgcatatcagaattacctaggtcaggacgaggcatggagatgctactttaataggccctgccgcagatcttccaaaccagaatcttaatcctggagtctaggaatctttatttttcacacaactcatccaagtggttctgataaaatcagtccagcacttttagaacccactgataacagacttattcctggagacagcatttgaggaggaattgaagatttttctaatgaaaagaaaaagggtcacatgaacagatgttgcagtgtacctgtgccagggatttcatgtgtacactttataggagaataagcaagagcttaggtaagttatagtccttaccattgggtctaaggcagtttccaggaaagcatggcaactcgttcagctatgtaagttgaactctgtaccacttgggagggaacattcccctagatgacaatgtcagtggcactcgaagttgtgcagtgcacattcttatctaccaacatatacagcagtccttctgggaaggaaatttgggcaggaaagggaactcacagtgtcggaatgcctggagcatttcttctagtctggtggacagaatatgaaagtatctgcctggcagtgcagtaaatgaaaagag

SEQ ID NO: 2392 - DNA, 3230 bp, Homo sapiens
acactgaataggaatggcagcttctaaaagtgggggaactacagtatagggtataggataaacgatgggacaaaactggaaaagacaacaaaagctttggaatgttccacaacttccttttattcgagttcctccctccatctatgacacttccttactaaaggccctcaaccaagggcaacagcgctacttttacagcattatgaggatttacaactccaggccccagtgggaggccctgcagacccgctacattcacagccttcagcaccaacagctgcttggctatattactcaacgggaagccttgtcttatgctcttgtacttagagattcaaccaagagagcctcagccaaggtagctcctcaaagaaccattccccggaaaacttcagccatgacaagaagatgtccatcagtactacctgtatctgtggttctacctagggcccaaagtaaaaggcgccaagtgctcaggaactgagacttggcagcattttcagaaacaggaagtttgcccatgtatccctggtatctagtgggtgctttgtgcatatttgttgaatgacagtgaataatttctaatataaaccccagacctaaaaataatctctgattcatataaattttgccagcaagaccaagaggtttaagagcaatggagccgagagtaagcaagcctttccacataacatccgtagagtaaaaggacttttaaagctttcaaagtaaaagtttactttggattagaacctcctagagaagtccccaaaacagtgaaaggggacaagtgaccagaaagggccaggtcctctgtcactgggtgaccatttctagcaaactatcatgtatacattttgaaaatatacaaaacaacacaggattaacactgatcatagagggcttacaaaatcatatcatcccagcaacaattggcctgtgcatttccttcctctcctcttccccatcaggcaatggcatttaatttagccccaaagctcttctagttctcacctggcttgatcactttgtgtcatcttgaaacatgcacttatcagtctaccacagctgaattgattttatggagctgtaactggccttgacatgggtaagagaattcatgcacacatctttccctggcagctgaagaaacactcttaaaagaatatgaaataaccccgaagactttatttcatgtccaacctttctgtggcctcaaatgttttaagcaaagcacataaaactatactaagcagtgagtcagttcatcatacaaaggcatagtattgcattagttatatttaatggttattttcatcaccagagattttgtgtgtgtgtgtgtgtgtgtgttaaaaatcagtcaccagtgctcatgtaaagtcaaaacaaaaaaatgcttcttcctcatcattgtaaaatacgtcaccccattcaaatcagctgatgcctatgaaaggaattggttgaggtggaatataaattttattgacaagggatgtgctaacattgatctgaaaggaatatgctgcattattatcagaaaaaaaatcattatcttctctttgcaatcatgaacatataagatataaaaattgtcatgagattctgaacactagtattgaggtccagcactacttccgagctcctatctgacttttctttgggaggaatgggaagtgtggttggcccactagtctgataagaagtcttggtgaagctaatactgaccttgctggggtcattcacttaatcataaagaagcttcttgacctctgcaaattctggccctgacatgtattctaaatacctttacagttctaagtgagaaattgttacataggcttagaagaagaaaagactccagtgggactgggatgagctgcgtggtagccctcataaagcagagaggttggtgggagacctaacttggcctatactagccttcccattgttttcacaatgggccttttatcccctctgaactgcttgcctgcacttttatcttagactttttttttgatgagcataggtatttgctgtgtaagccttatctagtgatgcagaatatcaaggaggccacttacaattctaagctgcatccctgtatcaaaaatctcagaagcaccttgcatctgatagaggcttgtaagagcagattgacaggtgaatgtcacaggtccataagaaggacaaatagatctaagttgggcaaaagattctatttgttggttctcccttctaagatgataatatgcccctgcacttgagaccttacttgaaacttaaagaaatgtgattggttatggtgctgggagaaaggggtgcacctgggaggacactgagaaagataaacaaaggggaaggaagagaggacaacctgtaacttttagaaaaggctactacttttaactgttggagaaaatgctattgcttgcactcacaatgtcaatatacattatcagaacttaagtcctggagatcagagactgtttcacctgaaattgctagcacctagaatgggccccggttgcggtaggcaatcaataatactctttgaataataatgaggttttcaaagattctgcaagtcagactggcctctggctttgtgatattattctagagtcccagtaacccacaattgttgatgaggagtagcagtagaatatcaaggacaggtgatgagacaacaagtctatcccgcaaagggcagggaatagagggtacactggaaagaatttgaaaacaataataaagctgactacaagttggtctattttttattaccaccatgagccagcaattctaaataatatcagtgataaagtattcatcccccaaaatattttattgaactaggttctaaacaatttctgaggttactgttgagttttaaataatacatatatgtaagcttcaaagtagcacatttgtactgtttttcttcaataatcattttactccacatggaaactaattcagggaatatcctgctatatagttggctctcagtacatatggtgtcagctcatgtgtctccagcccctgtagtactatatattattgcatttaaatgatggatttgaaataaacaatgattataccatgattgtaaagacaagaaacagaacctgaaatacttcaatttttgattctatgtggcagtttagagttttttaaaacaatttttatgtataatttatatgcaataaatgccctcaaagttc

SEQ ID NO: 2393 - DNA, 2284 bp, Homo sapiens
tcttatgtatttattattgctgagtcattggtgccttattcttcagtgtttcagtctgtatctcctaagcatcctgatgttagttttttgactataaaattgacctgcattctttactagcaattcaaacggtacagcactcttgaagtgtaaacattcctgttcctcctcaccccactctgcagacatgcctttctgtctgtcctcccggacttttcccctgcataaagatgttcattttgtacatacactcagacatacatgtggctgtattttttgtataccgatttctggatggaatgcacactgttatctgtttagttactttacgttttcatacaaatgacatcatcccacaaatagaattctgccatttactttcttcactattcttatgtggcatggttcatgctgggcctcggtcttttgagtggggtctgtttacccagtcccctgttggtgatcacatcgctaacttccggcgttttcctatcaccatcggtgcctccgtgaacaccttgtgaatgtgcctgtgccttcgttctggtgtcggtgcagagcagggtccaaggggcgtgacagctgggctcgagcccagcggtgtggtcatagagcatgttgtgctgaatggctctgccatggaccaagccttggctgctctaaaagccggctcattgccttctgcttctccggattcgttccttactccaggaagagcagtgcactgaaggagaaatgggaatgggcaaaaggaaccacatgctggccagacccctgcggggtcactttcctcagcctgggctccgacatgccacgtcaggtgccagcgcacatactctggacaccctcctcattctctctgggctttgatgctctctgtgagtcatctgccctccctttcccatgctacaggcatctaccttgctctgtcccacctaatagcttcaggactgaacaattcaggaaagggaagggaaggggtggaggagaagagggaagagtcggcccttggaaggttctccacggaagactgccttttttttttttgagatggagtctcgctgtgtcgcccagcctggagtgcagtggcatgatctcagctcactgcaaactccgcctcctgggttcaggggattcttcagcctcagcctccagagtagctgggactacaggtgcatgccactgtgccctgctaatttttgtatttttagtagagacggggtttcaccatattggccaggctggtctcgaactcctgacctcttggtccacccgcctcagcctcccaaagtgctgggattacaggtgcaagccaccgcgcctggctcgagagactgacattctgtctcagcacagctggaagaggctgcttgagcaccaggataaggagttgtcttgcattcaggggccatgtggtgtgcggatacctatttttctttcttttcttttttttttctgagacagagtctcgctctgtctcccaggctagagtgcagtggcatgatctcagctcactgcaacctctgtctcccgggttcaggcagttcttctgcctcagcctcccaagtagctgggattacaggtgcccactaccacacccagctaatttgtgtgtgtgtgtgtgtgtgtttttttgagatggagtcctgctctgtcaccccggctggagtgcagtggtgtgatctcagctcactgcaagctccgcctcccgggttcacactattctcctgcctcagcctcccgagtggctgggactacaggcgcctgccaccatgcctggctggtttttttgtgttttaagtagagacagggtttcaccgtgttggccaggatggttcgatctcctgacctcatgatctggccgcctcggtctcccagggtgctgagattacaggcgtgagccagcgtgcctggctaatttttgtatttttagtagagacggggtttcaccatgttggccaggctggtctcgaacccctgacctcaggcaatccacccgccttggcctcccagagagctgagattacaggtgtgagccaccgcacccggcccaaggatacctatttttcttaatgctggaagccacactcagacaccagagcagctctcaatgctgggaatcctgggagactgatgatgaccgcgtctccctctgggaccaaggatggtggaagggtgtgcagaattccaaatgttatttacatcactcactcttgtgtggagtgcataattgtctttgctggccaatttcatatcagttaaatataagcagtaaactaatcct

SEQ ID NO: 2394 - DNA, 2911 bp, Homo sapiens
tttaaagctccataatgatctcctttgactccatgtctcacattcaggtcatgctgatgcaagagataggttcccatggtcttgtgcagctccgcccctgtggctttgcagagtacagcctccctcctggctgctttctcaggctgatgttgagtgtctgtagcttttccaggcacaagatgcaagttggtggttgatctaccattctggggtctaccattctggggtctaccgttctgggactgtggccttcttctcacagctccactaggcagtgccccaacagggactctgtgtgggggctctgccccacatttcccttccacactgccctaggagaggttccccatgagggctctgcccctgcagcaaacttttgcctggacatccaggtgtttccatatatattctgaaatctaggcagaggttcccaaatctcaattcttgacatctctgcacccacaggctcgacatcacatggaagctgccaatgcttggggcctctaccctctgaagccacagcccaagctctatgttggctcctttcagccatggctggagcagctgggacacagggcaccaagtccctaggctgcacacagcacagagaccctgggcccagcccacaaaaccactttttcctcctgggcctctgggcctgtgatgggaggggctgccatgaaggtctctgacatgacctggagacattttccccatggtcttggggattaacattaggctccttgctgcttatgcaaatttctgcagccagcttgaatttctccttaaaaaaatgggtttttcttttctactgcatcatcaggctgcagattttccacatttatgctcttgtttcccttttaaaacagaatgtttttaacagcacccaagtcaccttttgaatgctttgctgcttagaaatttattccaccagataccctaagtcatctctctcaagctctaagttccacaaatctctagggcaagggtgaaatgctgccagtctccttgctaaaacataacaagggtcacctttacttcagttcccaacaaggtcttcatctccatctgagaccacctcagcctggaccttattgttcatatcactatcagtatttttgtcaatgccattcacagtctctaggaggttccaaactttcctacattttcctatcttcttctgagccctccagattatttcaacacccagttccaaagttgcttccacattttcgggtatcttttcagcaatgccccactctactggtactattagtccattttcatgctgctgataaagacatacctgagactgggaacaaaaagaggtttaattggacttatagttccacctggctggggaggcctcagaatcatggcaggaggtgaaaggcatttcttacatggcagcagcaagagaaaaatgaagaagcagcaaaagcagaaacccctgataaaaccatcagatctcgtgagacttattcactatcacaagaatagcatgggaaagaccagcccccttgattcaattacctccccctgggtcctgtgggaattctggaaggtacaattcaagttgagatttgggtggggacacagccaaaccatatcaatgattttgtactttaaccagctgaatggaagtacaatctcttgctatatgacacaataattatttgcaaaatgagtaaacatatcataaggaaattatttttacaaggtttgaaacctgaaatgcagtctattatcatacataactaaaaatagagcctcaataaacagattcccagttttgaaaatgcaacatttgtactccacattgtcagttttcttaggtatatttataaatactcctataaaaatgtaaagaaacacataatgtagattgctaattttataataacacaagttgattttgacatccaacttattaattatgaaatgacttttggcctagtaacaatgaaaatgggggcaaatacagataaatggtaattcttagaatgaactactcagcaccaattctaagtttttcttgatggtaaatcataatgttccctttctcctcggttctgcaatctataggcataccataattgtaatcaatagcttaaaaatatgtctctctgtcctattctgtatctgtatctcttggatttttacctttgcaatagtcaactgaaccatcttcttggagtactcatgaagatggaagtctacatggagaatacaggatgaatccactctgtctcctgcagtgaagtctgtttgaaggatgtatttggctgtcttctggacaggccattctaataacagaaacaaacaagttattttaaaacttattggaatattcaaatattaaccaaagtagaaaaatataatacacatccatgtgcccatcacagaacttcactgattatcatcatttagccagtcttgaagaagcaagtgctaattacaatcacaaatgaaacaagattcagacttcatgaagagcactgcgctataataaaagaagaaatgagcacatacattcttttactgacagtcaaatggtgaaggtgggcagaatcattatgtgatgcaacatggcaaaagtatacagacagtgcatccagaggaaggcaccttgctgaatgactagaatggaagtaggagacattttgcaggcccccttcatcctgcagggagaaccagaaccacagcagctctatttgcctattcctctttaaattacaaagttaaaatttgggagtagtagaaaatcaattggttatcttatagagtctcctagaatatttcattggcattgagaaggtggaaaatgcaaattatatactttaaaatgtaatttttgcttttcacatatgcttaaagcctaaaacctcttaataaacttcttctgaaatat

SEQ ID NO: 2395 - DNA, 2393 bp, Homo sapiens
aaggggaaaaaaagaaacagttttccagtgaggcttgtcagggggaagactgatcgccggcaggccggctcggaccatgagcacagttccaagaatgcagggatgaggaggagccgggctgggctgttgagtccaggctgagcccacacatcatgttcctctctcagagcatcttgacaggagggaaccatctctgtgggacccgcctctgccatgaaattgcccatgcctggtttggcctagccatcggggcccgagactggacggaggagtggctgagtgaaggcttcgccactcacttggaggatgtgttttgggccacagcacagcagctggccccctatgaggcccgggagcagcaggagctgagggcttgtctgcgctggcgccgcctccaggacgagatgcaatgctcccccgaggagatgcaggtgttaaggtttccacatgttggcggatgcagtggaagcttctcttgagatctttgccacactgttcaacatgtttgaccactctgtcctaaaaacgctttcttcttaaagcactttctcctcctggcttctgtgtgtcttactctccttgagttccctctgcctctgtggccagtccttcctcacctctcttgctggcaggttaacagtctccacttcaatagcccaaggctcagaaagactgagtaatgcgtctaacctcctctagctgataaagaaccaaggctcagaaagactgaataacgtgtctaacctcctctagctgataaagaagagaacagggatttaaacccagggacggaaactcttctcggttccctataccatattcctgtcttcagggaactgagagcatttagttgcattaaaacaaataaaaaaacaaacaaacaaaaaacctgcaggtatcttgggctctggaaggacatacaggtcagggtgaaaagtatgcttggtccaagcatcttttttcttttaacacatgaagtatgtgtcttattattttaaaagacattgagaaaaaggaacattcaacattctcttggttatagatactggagtattaacaaagtgaaaagagaaaaactaaaattttgtttggctctgacttactagttttagtaatttataagaacagctttccatttgtgcctttcatacatccactgagtcatgaggtttcatcaaatgtttctttttttcttttctttctttctttcttttttttttttttaagacagagtcttgctctgtcgcccaggctggagtgcagtggcatgatctctgctcactgcaacctctgcctcctggattcaagtgattctcccacctcagtctcccaagtagctggaactgtaggcatgtgccactatgcccggctaatttttgtatttttagtagagacagggtttcaccatgttggccaggctggtctcaaactcctaacctcaagtgatctgcctgcttcggcctcccaaagtgctgggattataggcgtgaaccactgcgcccagcccagatgtttcttagattgactttgctgtgtttcctttgtatccgatgtgtctgagattgacttccttgtaagtcattcgttaacaggtttcttgtattttcctagccttctcagccttcattggctggagagcctgtaatgtggctacaggcttctgaggcaagacgatttgctcagtttcaaaatgttaggggtcacatgccatttttcatttgttaattattgaagatgtctttcccacagataagaccccaaggactctcccagactcttcatctcctctctggccctgggcagaactcttccccaggcaaagtctgatttcagtgttcctttctgtcctgccactgttcagctctctcctgtcatctatcccctgcctacaaggtcccctcctgactcgtgcagcagtggtggctcttgcctgagatgcatggcagcttccgaaaggctcgccatgcctcctgtctccagggtgcagctggattccggcagcttctgcctaagtgctttcagttagcacactctgacaggccccagggatggaagagctaaggtggcagggtcagaagaaatctgttgtttttttattgtttgtgatttattatgacttctctttttttctggattcattgttaaattcaagctcctgctgaggaaacgttaaaatgtatcgctttaaggaggtgcaacaggcaggagtctatggaactcttaatcttagctgctgcctccactttgatacaatgctagataaatgcgagcatctttccctaaccttcctcctgaatgcctcatcccttgatcacaaaaacatcccttaataatagggggaaaaccccaagtatgtaaccctatccatagccaaaataaagtctgcatgccac

SEQ ID NO: 2396 - DNA, 2032 bp, Homo sapiens
taattttggaacccatgtgagattcatgaagcagcccagctctggaaccccagtcagctcaggattcagagacagctcccaaatcaaatcctattcaagaactcagaccagctcagaaacccaggtccacacggctgcccagtccagatcccaaccccagttgcatccaagtgcccatccccatcctgcagcccagtccagctccagtgatgattccagctctgagactgagcccagctctagaacctcgcctagtgctacaaccaggcccaactccaggattcagaccagctctggaaccccatccatcttggaagcaagacccagctccagcacacagcttggtgccaagccccactctccttgcacaatgcagctcagctctagaatgcagtttacttccaggacccagaccaatttcaaggcctggccaagctccagagctcaatccagcccaagcaccgcacccagctctggaactcagctcagttctggagcacaggctggttctgaaatcccagccagctccaaaacacagacagcagctgagacccagccaagttccagaatccagctaagctctggagtccaatctagtcctgggacccaggccatcgcagcaatagaattaagctccacagccctgtctagttccgacagcaggtccagctccaggacccagcgctgcccaggagctcgaccagcctctgggactcaattcgcctctaaaaccctgccaggttctagataccagctccagaccacagccccagacagctctggtattcaactggactttgggaagcagagcagttctgaaagtcagcttagctttggaactcagcccagctctgggacccagataagctcaagaattcaagccagctctggaagtcagcttagttcgggaacccagctgatttccggagcccaacccagctccagaactcagactagttctggaaaccagctcagctccgggacccagaccactgcaagaattcagctcagccctggagctcatcttagctccagaacccagtccagtcctgagaccaggctcagctctgaggctcagtccagctctggaacccagttcagttctgggattcagtttggctctgaaacccagaccggctcaagaattcagcccgactctggagcccaacttagttccagaacccagtccagctctgagaccgggctcagctctgaaacccagaccggctcaagaattcagcccagccctggagcccaccttagttctggaacccagcctgtttctggaacccaatccagttccagaactcacaccagttcaagaatctggctgagccctggaaatggaatctgcccacagacccctggccttgaccctagaatccagcttgaggcccctgccccagcccaacctcagcccccaggcccatcccccagagaccccaccccagcccctagcaaagacccccagcctctgcctcagccccatgatcaggtatgtggcatccaggccagccttggccccatcccaggcttaccccaagcctcctacctggccccacagtcacaggtctcctcaaccccccagaagccagccgtctctcccaagccccgggtgggaccccagaagtccaccccacccaccatatctgtcactcctagtcctgcccctagggcagccctcctgagttcccagctgtctgagtccccagctttggcgccagccctttgccccactctgggggagccaggagcccgcccttaccgcggggggccgtagcttggctgtgacttagccctggttcatgtggttctcgtcctctcctgtcccttccagcctggggcccccagaagcagcaagtgaccttatttctccagcaggcggtggtagggagtgtgcggtggtgaaaacaggggcttcaccggtcctggctcagatccaggtccttggagggaaaaggagggcaggagacgggttgcaccgcatgtaccctgagggctcatggtgaataaaggcaccttccatctctgc

SEQ ID NO: 2397 - DNA, 3500 bp, Homo sapiens
agtccgccgtccgccctccgcgcccgcgccgctagcatgaccgacgcgctgttgcccgcggccccccagccgctggagaaggagaacgacggctactttcggaagggctgtaatccccttgcacaaaccggccggagtaaattgcagaatcaaagagctgctttgaatcagcagatcctgaaagccatgcggatgaggaccggagcggaaaaccttctgaaagtggccacaaactcaaaggtgcgggagcaagtgcggctggagctgagcttcgtcaactcagacctgcagatgctcaaggaagagctggaggggctgaacatctcggtgggcgtctatcagaacacagaggaggcatttacgattcccctgattcctcttggcctgaaggaaacgaaagacgtcgactttgcagtcgtcctcaaggattttatcctggaacattacagtgaagatggctatttatatgaagatgaaattgcagatcttatggatctgagacaagcttgtcggacgcctagccgggatgaggccggggtggaactgctgatgacatacttcatccagctgggctttgtcgagagtcgattcttcccgcccacacggcagatgggactcctgttcacctggtatgactctctcaccggggttccggtcagccagcagaacctgctgctggagaaggccagtgtcctgttcaacactggggccctctacacccagattgggacccggtgtgatcggcagacgcaggctgggctggagagtgccatagatgcctttcagagagccgcaggggttttaaattacctgaaagacacatttacccatactccaagttacgacatgagccctgccatgctcagcgtgctcgtcaaaatgatgcttgcacaagcccaagaaagcgtgtttgagaaaatcagccttcctgggatccggaatgaattcttcatgctggtgaaggtggctcaggaggctgctaaggtgggagaggtctaccaacagctacacgcagccatgagccaggcgccggtgaaagagaacatcccctactcctgggccagcttagcctgcgtgaaggcccaccactacgcggccctggcccactacttcactgccatcctcctcatcgaccaccaggtgaagccaggcacggatctggaccaccaggagaagtgcctgtcccagctctacgaccacatgccagaggggctgacacccttggccacactgaagaatgatcagcagcgccgacagctggggaagtcccacttgcgcagagccatggctcatcacgaggagtcggtgcgggaggcgagcctctgcaagaagctgcggagcattgaggtgctacagaaggtgctgtgtgccgcacaggaacgctcccggctcacgtacgcccagcaccaggaggaggatgacctgctgaacctgatcgacgcccccagtgttgttgctaaaactgagcaagaggttgacattatattgccccagttctccaagctgacagtcacggacttcttccagaagctgggccccttatctgtgttttcggctaacaagcggtggacgcctcctcgaagcatccgcttcactgcagaagaaggggacttggggttcaccttgagagggaacgcccccgttcaggttcacttcctggatccttactgctctgcctcggtggcaggagcccgggaaggagattatattgtctccattcagcttgtggattgtaagtggctgacgctgagtgaggttatgaagctgctgaagagctttggcgaggacgagatcgagatgaaagtcgtgagcctcctggactccacatcatccatgcataataagagtgccacatactccgtgggaatgcagaaaacgtactccatgatctgcttagccattgatgatgacgacaaaactgataaaaccaagaaaatctccaagaagctttccttcctgagttggggcaccaacaagaacagacagaagtcagccagcaccttgtgcctcccatcggtcggggctgcacggcctcaggtcaagaagaagctgccctcccctttcagccttctcaactcagacagttcttggtactaatgtgaggaaacaaacatgttcaggccccgaacatttccggtgctgactcggccttaaacgtttgtgccataatggaaaatatctatctatctgttctcaaatcctgtttttctcatagtgtaaactcacatttgatgtgtttttatgaaggaaagtaaccaagaaacctctaggaattagtgaaaaaagaacttttttgaggtgtgttactatactgctgtaagttatttattatataaagtattgtaaatagaatagtgttgaagatatgaaatatggctatttttaatggtgacaattatgacttttagtcactattaaattggggttacctatatcagtacaatttgtagttgtttccaggtttggctaataatcattccttaacctagaattcagatgatcctggaattaaggcaggtcagaggactgtaatgatagaattaaattagtgtcactaaaaactgtcccaaagtgctgcttcctaataggaattcattaacctaaaacaagatgttactattatatcgatagactatgaatgctatttctagaaaaagtctagtgccaaatttgtcttattaaataaaaacaatgtaggagcagcttttcttctagtttgatgtcatttaagaattactaacacagtggcagtgttagatgaagatgctgtctacaaggtagataatatactgtttgatactcaaaacatttttcattttgtttaaagtagaagttacataattctatattttaagtcttgggtaaaaaagtagttttacattttataaagtaaagatgtaaatgattcaggtttaaagctctatttgacttcctttttttgtttgagatagcgtcttgctgtgttgcccaggctggagtgcagtggtgtgatctcagctcagtgcaacctccgccccctgggatcaagcgattctcctacctcagcctcccaaatagctgggactacaaggtgccctccagcatgcctggctgatttttgtatttttagttgaggtgaggtttcaccatgttggccaggcgggtttcgaaatcctgacctcaaatgatccacccacctcagcctcccaaagtgctgggattacaggcatgagccaccacaaccgtcccactattttactttttaaaatgacattcctactgattgatttttatcttgctataagttcgatgacaccgtgaatctaataaggttcactgttgacacagtacaagctacatagctaaaatacatagcattgaagactaattttaaggattgacaagggtttattttctattgtgcaatatcttaaaggaagcaaccacctttgggaaagtgtatctgctgctcctagggccatgcttgtatacatatttaaataaacatattcatttacccg

SEQ ID NO: 2398 - DNA, 2507 bp, Homo sapiens
aaggccaagttcaaggtgccagcaggtttggtttctggggaggtctctgttcttggcttgaagacagccactttttcagtgtgtccttacatggccatttctttgtcatccctggtgtgtcttcctcttctgacattaatcctaccagtttagtgccctactcttatcatcgcatttaacctcaattacctcctccaaggcctcatctccaaatacacttacattgggggttagggcttcaacacaggaatttggttggcggacgcagtttagttcccagcgggatctctcaagtagctgcagtcagaggatggctggggctggaatgcccaagacagctcagctcgcaagtctggcatctgggcagggacagccggaagactgggctcagctgggatgctggcagggctgggctctttctccgtgtattctccaggcctctcctctccacgtggcctgtccatgaggtctccctatcagagctgccagaccccttgatgtagtgattcacagctcccaagacagcacaggtggaagcttccaggcctcttaaggctaaggcagagaactggcacagccttactcagctgcattctgtgaaagccaccccagggccggcccagatgcactgcgggaggccatgaatcccgggaggcatgcttcactgcagcaactttggagactgaaccgaggtccccatcagaggagaccaaagctgtcttccccctttttctccttctctcccctccaaccctccgcaggagccagagaagaagatcgtccaggagctgctggagacagagcaggcctatgtggcgcgcctccacctgctagaccaggccagtggccaggacacccccctctagagccccagccctgggtctcctcacctcaccccttctcagccttcccaccctgctcaccagagctgagtcaggagccctggctttgactccaggaagccttggccctttaacctcaatggctggggttggggtagaatcaggaggtcttgttagcagtactccccattctgcctgtggtgcccaggctggcccctgtatagcagagaacacaccagctggcccttgctggcctacacggtatcttcatctgtcatctcaatgcccacaacctcacaacgatcttacctttcatagtttttcaggagccctaaggctagagggttattcatcaccgcagggagctctagtctgatgaagtccaagacctccacagtttgggcctgtttatggcattcatcagctgccagcctttggccaagtccctgcatctctaggctttgccttgcccatctgtaaagtggccagaacacaacctcccctgccttcttttcccggggttgctgtgaggatgccgggagatcagggaggtggaagcatgcagtaggcttggtgggaccctagttcccccgggctgatgtgtgggtggctccctgtcactgcagtgagtgacctgtcgtggcggctacaggtgtttttccaggagctgctgaagacagcccgcagcagcaaggccttcccagaggatgtggtcagggtcatcttctccaacatctcctccatctatcagtttcattctcagttcttcctcccagagctgcagcggcgcctggacgactggtgaggtccaccaggagcccctgaggcctcagaccacagccctggccaggtggaggtggggagaccccagggcgctaggttcagcctcctaggcccaggcccttattgtgtggccatgcctccctggggctcggtctgtctgcacagtgaagggcttgggtgaatgagctctgagaggctgtgtgtgtgcagactgcttcctggggaaaggggtggatcaggtcctggccaagccaagtgaccaagtgactttgggacagtgaaaatagccagtgccaactgagggcttcctacacgcctggccttgggctttccctctattaactccctcaatcttcacatcagcctgctgtgtgatgacggcatcatggttatgcaagaaaccctcttgttttcacagatggccactaaagcatttaacagtgaagttacttgccttatatagtttgccacgaagtctaggatgtcctttaagatctttggcaaagaagaatgctagtaattgttaaacctagtgatgtattgattgcttaaaacatttataataaactgttgtttttttttaagataataatagccaggttcggtggctcatgcctgtaatcccagcactttgggaggccaaggtgggtggatcacttgagcttaagagtttgagaccactctgggcaacatggtgaaaccccatctctaccaaaaatacaaaacttagccgggcatggtagcaggcacctgtagtcccagctactcaggaggctgaggttggaggattgctggagcccggaaagtcgaggctgcagtgagccatgattgtgccactgcactccagcctgggtgacagagagagaccctgacttaaaaaag

SEQ ID NO: 2399 - DNA, 2876 bp, Homo sapiens
agcattgcaaacacgctcccccccaaaccacaaacgcgcccccacacactcgcttactttccctcacaaagatgcccgcttacacggccacagcaggcacgctcagagacacgcagttacacacacatcgctgtacacaaccccacatacaatcaaaaaacaaaacacgaaacgttcccctgggcactaaatcctcacgttaacgtacacacacaaacacacgccctcctctcccacttcctcttccataccccttcctcgaggccccccacccctgattttcggcacccccagtcccaatcataattggcgcccgcgcagccctctttggacacacacgcgccgcccacgcacgcgctcccctccccggcaggcgggggcggcttcggccgggagccggcggagcccgcttcggattccaggtgtggcagtgactccgcgctccacgttttgcaggctgccaccgtgtcggaggcgaggcgaggaagggagctggaataacaaaggtggcagctgagcatccctggagagggtgggtggtatgaaagcacttccagacctctagggacaccagggagtcatggtcccagcacattgctgtgtgattgagcccctcctcagcctgtgggtggcctaagttcacagggaggtaatggggtagattggatacctctggggtcttggaagaagctatgacttatttactgtctactatgtgagttttgggcatccttctatcagcccttatcccagggcaggaagaacagccttgatcctggatcccaggcacagctgggtgtcagacctggaggagaagctcccacagtgaccaagatagaatcggcatgcagctgaagctacttgctcagagccgcacagcaagcccaccaccctgaacctccagattaccaactcagcattgtgtcctgacagtgtcatcatagatggtcaacaccgtcacctgggcagcactgaagcccagagcgggagagactggctcaagaccatgggccctgacattctccagctttcatggtgttcctgcaatccaagtgccgcttatctctctacaggtccaccagatgaccggctggcctcctaattgggcttcctgcattcctgcctgtgctcggagctcccttctccacttgcctgctggaggaggtttacaaacaaaatcagatcatggcactcccctggggccctgcatcctgtggccagcaggtcttggaaacgtccctgtaccccagaaacttcctgatcagtccctggtcagtgtatatcatgcttcctgtgacatgacatcaacttttcagtgacttccactggttttggcccagctcgaagagcctgacacctctgcagggaattctaccagggagctcaggagggggaattgcactgaagatttgtcccatcgtgaagcaagagcactggaacttacactccaccatcaggccctgtcacaggagaacaaagaaggaaggcagaggagatcatgctccggccagcagggaatctccatttttttcagcctcataccttggaaagtacaaaggagtgagagctgggactaccagccagagggttcatggaggtagtgggaggggaagatgggttctgcatggagccactccagggacttttcttctgtctcacagcctgacaatcacctctagctgttctcagtcccattctcatcaatgacctcgtctcctgattttgtacaatatctaggtgaccttctcttctttccatcttcaaacgcttgatcattgatgctcccttttctcttctctctcctcctgggaaaagagaaggaccaacatccccctttcccttcctcctgtgctgtcccgacccctctgagacctggctctagcagtaagtccctctctcttctgcagcaccagcctctgcccatccctgccctctgcacacaaagctctcacattgtctgcactttaagaacttttgtggcaaaccctggcaaatcctgccacttgtttccactcttctcaaatggctttgaggtcatcattgacctatcccatttgaccctgtcctgtatctgatgttgtaccctttctccttgatcccactctggcaactctcccactcccctttcttggatcaactgtcttgctcctcagtcttgatcaatgcctccttctctctctttagccttggccctttttggccatggaaataaatgtgaaatacataaagcttcattttatcttatgattatagctatgttgatgttacccaagacctaaaagtcacactctctaattacacttccctcctgtgttctgggtcctcttggaccagtccttactctggctcccctcctggatgtctcccagacttctaattagaattactgtttcctatatcaagctaattatctttcccaccaacctcctccatccttgggtgaaagcatcacttggttgcaaaagtcagaaatctgggtttcattcttgcggtaggtagaataatgcccccaggccccaggttttgacatccgaatccctgggactttgcagatgtgattcagtttaggattttgagatggggagattatctgggagagcctgatgtcatcataaggttcttataagagggaggcaggagggttagagtgagtagtaagagatgcaacagtggaagcaagaggttggggtgatgtggccacaagcccaggagtgctgacagacatcagaagctggaagggacaaggaatggtttctcctctggagcctccagaaagaaccagccctgctgacaccttgattttagccttggaagactcattttggacttctgaccttgaacgttgtaagagaataaatttacatattttaaactgg

SEQ ID NO: 2400 - DNA, 2347 bp, Homo sapiens
ctagtgggtgggaggaagggccgggagtgggcgcgatgagcgagagcgggtgcggacgcctacgacatccccgtcgcacccgtgcctcggggaggacttcgagccgctcagagctcgaagactcgcgcagtatgaccgaaagcccctccctgccttctctaagcagctcagcctgtgtttctgtggccagaaagttgcagttcttcccactcgaggccaccaaagtcagaaaagtgttgcaaatgggactccgagaggccaggctgaagctgccacactggctggaatgggctgccttggagggggacgtgggaatccattccaagggacgggggattctttcaaagagcatctcgcctgcttataaaggaggctggctctgaagccgtcatctggagtctgtagtgaaggcctcttgttagggaaactggatggttagtgttcaaaatccattttgcgtgtgtgcaaggacacaggtggtattaaacagaagagaaaatcagatgactgtgaaatgttcaatactaaataagatgatttttagtttttccaggggcattgttatttgtgaccacaatgaaaaatgtagacagtgatgatctggtaactggcacacttcccaagctcaagagctcaaaagaatggttggagcccaagcccctttgttttatggaggtatatatcaaatagtgtgggatttggagatttttttacttggatcgttgcagtaggaagtggcttgtgctaaatatattgttttttctattgtttgtttttatttcattctgtttattattcccttcactttactaactttgtatattcactttgctgtttttttctaacatcttaaggtggaatcataggtcattgattatataccttttaaaatgtaacatagctataagtttctcttgaggtactgccttagctgcatcacccaaattttgatatgatgtatttatttatttatttatatttgagacagggtcttgctatgtttcctcctggaatcaagccatccttccactccctagtagctggaagtataggcgcacgccaccatgtctggctaatttttgtattttctgtagagatacaaaaaatctctacactgtgtcgcctaggctggtccccaactcctgagctcaagcaatccacctaccgtggtgttccaaaatgctgggattatagctgtgagcccttgcgcccagccagttatattgtttttagattgtagtttcttttttctaaacagctttattaagatgtaattgatatacagtaaactgcatatatttaaagtgtgtgtctggcactgtgcctcatgcctgtaatcccagcacgttgggaggctgaggtgggagggtcgcttgagcccaggagttctatctagaccaggcagagcaatatactgagaccctgtctccacaaacgaacaaacaataatagccaggtgtggtggcatacacctgtagtcccggctgcttgagaggctgaggcgggaggattgcttgaccccgggaatttgaggctgcagtgagctgtgattgtgccactgcatccccacctgggtgacagaataagaccctgtctcaaataaagtgtacaaacttggtaagttttgacatgtatacacacgaaaacatcaccacaatcaagatggtggacatattcagtactcccaaagcttccttaatattctgttgtaatccctccctcacatccccccaccactgcttttctttctttctctttctttcattctttctctctctttccttttctttttcttttctttctttcgctctatcactcagccaggaaaacactggcgtgatctcggctcaatgcagcctctacctcccgggttcaagtgatcctcctgcctcagcctcctgagtagctgggattacaggcctgcgccaccacacctggctaatttttttggatttttagtagagacggggtttcaccatgttggccaggctggtcccaaactcctgacctcaagtgatctgcccgcctcggcctcccaaagtgctgagattataggtgtgagccactgcgcccagcctgctttgctttctgtcactctagtttgcattttaaaaattgtatacaaatggaatcttacagtatatatttcttttccttctgtttgtcttctttcactcatcataattattttgccactcacccatgttgtatgtatcaatacttcattccttttttggttgaatgctattcccttatctggatatatcccaatttgttcatcctgtttatggacattcgggttgattccagtttggggctattacaaataaagctgttatgaacattc

SEQ ID NO: 2401 - DNA, 1932 bp, Homo sapiens
ggtgcatggagtagacgacgaacagcaccgggggcgccgagagcagcaggatgtggaagagccagaagcggtagtgggagaccgggaaggcgcggtcgtagcaggtctggcgacagcccggctgcagcgtgttgcacacgaactcctcttgctcgtcctcgaacacggcgccgcccaccgtggccagcaccaggatgcggaagatcagcatgaccaccagccagaggcggcccacgagcggcgactgcagctgcacggcgtccagcagcgagcccaggaacgcccactcccccatggcgctggggacgcggggcggggagtcaggggatggggcaagtcagggacccctgccccttccaagcctatcggggtggggtccgttggaccttctctgacttcagggtgggtcgtgaggtaggagaggcccgggtttagcgatgagaccagtatgaaacggagggccacgggagggcccgaggggagcaggcgacgctcagctatgggttaccttctctttgggaccgatgggtgctggggaggatcccccatttgcattttagccgcaccccctgagccgtctccgttcgaccctgggatcctccagatcccagattcttaggaaggaccttggagatcagctggaccagcccctgacttgcctggtttcggaagcggaaacccagcggtgcccttagctgtcaaggatgctgtgggaagagtggagcctcgaacccgagacgctagacccaatttggtgcccatgggaggagtgggagtggcagaggcagcgagaccactcctttcttggcccaccatttctctcaccatttttactgcagtgaactcctttcagggtggggggctggtacagaggcaactccgctttcataactctcacagggtcctttgtcggaggtgtccctgccctcctaccccagcgtggtgggagtgcgacgccaggcttctccctcctccctggcctcctgtgcctccagcctccacatctcctgagatcctccccaccccacacttacacaggtccccacacgcccctggtgcccctaaaccgccacccaaccccactcaccctggggccgggactggggtgtcagagctgagccagggaccttgggaggtggctgggaccggcgcctcctgctccctctttcattttccctttcggatttggccaggatggaggacaggacaggatggctgagaggggctagcgctcccccttctcttaaaggaacagggtgaccctgctggctggctccgcccttgggaacaggcacggaccacgccccttgctgggctctgtggccctcactctttagctaaatttccatctggaaatgggggaggggggtaaccagagccacatcctttatcgaggaagctgggggattcctagaagcccttcccagacagaccctcagtctggagcctagatccactacgcactaaccatgccctgtgaagatggtcttcggggacagagggaggtttggtgctggagtttaaggggcagcaaacatctaacagcttctggttccagctctgccaccgctcaccttggacaaatcattcggcggtactgagccaggctttcctgccttgtcaacaaaggcggccagtccagctgacccccaagtttccttccagctttacatcttttttggaacggggtctctctacatagcccaggtcgatcttgaactcctggcttcaagtgatcctcacaccttagcctcctgagtagctgggattctctacttcttaatattgaattcccaaccatattacagagaaccaaaaaaacccttgtgcctgcaaaaaaaaaaaaaaaaaaaaaaatcccatatggaaaaccattaaaatatcccaagtgcctggctttgatagttaaataaaatctttggtttccttccc

SEQ ID NO: 2402 - DNA, 2066 bp, Homo sapiens
tttgtatagtccgctggttttcacaaatgctgcttgtgctcccgattggttggactccagcaaggaggtgatgctttcaagagagcatcagctgatacaacctaaggtcgcctggataagtatttgggtttctcaggccataggcagtgccatagagctcctaagagattatgtcttttgtctgaattcagagtttttgttttttggctgtctcatggagtttgcagtggcaagccacttccttcaaagattctgtgaaatcttgtggctttcctgctgtgttcctgtggtggtttttggagctaaagttcacgatgtgagtttctacatgctgttctgtccttctgagtgggagctgcaagttagtcctgcctcctcaccaccatttttccctattttcagttttttgatgctaccacagttttataccactttgttctcaatccctcagtctcatcctgcagaagcccttgcctccaactctatggagaagaattaaggcctcccagtgagagtttcttcaacctcttctccaccccaggatttcagtttcccactgttcccctccccgccgccagcccaactgctgagggttctctcctggaacctgccacacttctttgacctccatggttcatctgcccagtggtcttcccacctcctcattccgtcgtacgccaaatccatcctacactcagtgtcatatttgtttttctcagttgttacctctcccactcaaaccccttccaaatgccccttttgagtaagctcctcaccatggcattcagagccgtgcatttgagtccagtggacatataccccacctctatgccccatcaaaactggattgttgatcattacccaaaaagatcttgcagtttctctccttccactgaccagcgctaattcccttcacatgaaatattctgtctccatctccacttgctaaagttgtttccatccttcaagactcaaataccacctacctgatgaatcatgagctgattttcacttctgtgccagagaccctcccatccctcctgcctttgaacatccatagcatgtaatttatactgcttttccatcacttatggtggagaacttgtattcctgacacttgcctaccttgatttgtccaccaatttgattgtaagtgtcttgaggtcatagaagtaaaagcatgccttgttacccagagtatgggctgtctgcctttgctatcagaagccgtccttaattgtgaactgcattgaattctcaacagagcaggacctgtctctgtaatttaatcttttccctgacttgaacaacaatgaagcagggagacagaatgctctggctgacatgggaatcccagggtgttcactaagtacacattcttgttctgcatccctggagattccgaatgaaaaggtagagcccagataggccaggtatggtggctcatgcctgtaatcccagcactttgagaggctgaggcggatggatcacttgaggtcaggagttagagaccagcctggctaacatggtgaaaccccatctctactaaaaatacaaaaattagctgggagtggtagcaggtgcctgtaattccagctacttgagaggctgaggtaggagaatcacttgaacccaggaggtggtggttgcagtgagccaagattgtgccactgcactccagcctgggtaacagagtgagactctgtctcagaaaaaaaaggttagagcccagaaacctgtatcttttacaagcgtctcagctcagaagttcattgctactaaaacaccttgtgagaaccactggggcagtggaccaaataaagttgagtttgaatccagttcttcagttccctagttgtgcagacctaagcagcctcctcatctgtaaaatgggataatacttgcctttttaggccactgcagggagtgaataaaacaacggatgtagctgagctcggtggctcatgcctataattccagcactttgggaggctgaggcaggaggatggcttgaacccaggagtttgatgccagcctgggcaacacagggagacccccatctgtac

SEQ ID NO: 2403 - DNA, 2753 bp, Homo sapiens
aagtttctaacaggttgaactttggatttttttacacttaatactccgatttcttgtaaggtgttagttccttagttctttctccagtaaatcctctgatgtttacataggcttaattttagcctaaatatttctccacatttattgcatctacaaattctcttctaatataaactctctagtgtttcttaacctgcagtttttgaacagatgtttttccacatttattacatttgtcgtatttcgctccaatgtaaattctctgatgttgaacaaagtttgagcaactgcttctgagtcttccgctagtacaaaatgtgtacagtaagatccaggatacaagtacaggtactacaccctctttatatttgtattgtctgtcttaagaatactcttcttcgctttaatggcctatattttctaaaaggtctttcaacagaaattacatttataatgcttttgttaaccataaattctgatatctggtaagatgtgagtagaaattaatggcttttgtatttttatatttgtgcaattattctcatgtataaatgctatcacatgcaaaaagatatgagcattgattaaaagttttgccacattttttgtatttctacttttcttcagtactaattacatacagtaagatgtgatgagaatttgaagtctgccgggcgtggtggctcacgcctgtaatcccagcacttggggaggctgagatgggcggatcacgaggtcaggagatcacgaccatcctggctaacatggtggtaccccgtctctactgaaaatacaaaaaattagcctagcatggtggcgagcacctgtagtcccagctactcgggaggctgaggcaggagaatgaagtgaaccgaggaggcagagcttgcagtgagccaagatcgtgccactgcactccagactgggggagagagcaagactctgtctcaaaaaaaaaaaaaaagagagaatttgaagtctttgccacattttaatttttcatatggcttctcatcaatatcatttatcttatgtttagaacacagtgaggtgtggttaaaagctttctcatatttttcacatttctggagtttctctccattatgaattatcttacgattagaaaagattgaggaacatttaaagactgccacattcttcatattggtaagacattcctccagtacgagttctcttatgtttaagaatgctggagtacagcttaaaggcttttccacatcctttacacttgtatggttttatctccagtaagaattctcctatgtacataaaggtttccggactgtctaaaggctttgccacattcttcacatgtgtagggtttctctccagtatgaatcctatgttcaattagggttttggagctattaaaggttttatgacattctaaacatttatagggtttctcaccagtatggattctcttacgtttagcagaatttgaggatgaggtaatgactttgccagattccttacatttgtaggtgttctctccattatgaattttctcatgtttatttatgggtgaggaccgtttataggctttcccacattctttacatttgtaggattcatctcccatatgaattttcttatgttcactcagggttgtggaccatctaaaagctttgccacattcttcacatttgtagggttgctctccagcatcaattttcttatgttgattcaggtatgcggactgtttgaaggctttcccacattctttacatttgtagggtttttctccagtatgaattcttactttcattcagggttgtggaccatccaaaagctttgccacattcttcacatttgtatagtttatttccagtataaattttcttatgttcattcaggtttgtggatcatccaaaggctttgccacattcttcatatttctagagtttctctccagtataaattttattatgttgattaaggtatgaggaccgcttaaaggctttgccacatcctttacatttgggggttttatctccagtatgaattgtcttatatttattcaggactctggaacgtctaaatgctttgccacactcttcacatctataaggtttctctccagtatgaattttcttatgtttactcaggtatgtggaccatccaaaggctttgccacactcttcacattcgtaaggtttctctccagtatgaattgtcttatgtttattcagggctctggaacataaaaaggctttgccacactcttcacatctataaggtttctctccagtatgaattttcttatgtttactcaggtatgcagaccatccaaaggctttgccacactcttcacatttgtaaggtttctctccagtatgaattatcttatgtttattcaggtctgtggaccatccaaaggctttgccacactcttcacatttgtggggcctctctccagtatgaattctcttatgttcattaagggttgtgaaccgactaaaggcttttccacattcttcacatgtgtagggtttctctccagtatgaatactcttatgtttattaagggttgcggattgtctaaaggctttgccacattgttcacatttgtagggcttctctccagtatgaattctcttatgttcattcagaactgaggacctactaaaggctttgccacattcttcacatgtgtagggtttctctccagtatgaattctgttatgtttagtaagggttgtggacctattaaagactttgccacattcctg

SEQ ID NO: 2404 - DNA, 2378 bp, Homo sapiens
gagttgcttggaggagcttggagaaaccagaagtgagatccaggagaagtaaggccctggagtgccaggagcccttctcccaaagatggagaaataaatgaagaaatacaggaaaataagcattgggtgttttgcaatggctacacaaactagtcatgtcttccatggtcaagaaaatatgtttctggaaaaccattgcattaggagaaacactggcagagattcaaagaagccactaaagcagaagaatatgaatggacttgggcaaaattcggacaatggattattggttacacatgttaaccagacacaggacttactgaggctgcaggggagtgagacccagtcttcagattgggaggactctgaagactggctttcggctcacagtttaaaatgtcagaaactcaccttggctgacctgataagccagggcacagaagtgctgtaagtctgaagctgttccccgcaccccccacagctgcagtgacacatgcaaccccctggcccgagagatcccctcataaggctttgcttcttcagggaggagggcaccaatgtcgtgcagaaaatatgtttctccacccagatcatccgccattttgagtcaaagctttctgacactattgaagtctatcaagagagaattcagtggctcacagaaaacagcaagaaggcatttggcctcatcaaaggggccagagtcagcatcctcatagatgtgtcagccatcagcagtggccctcagaaagaagagttccaaaaggacctcatgagcctcatcgatgagcagctgagccacaaggagaagctgtttgtcctgtcctttggcaccaatgccgggtccctctggccagaccccatggaagtcagcgcctccaccctccaggaacttaagctctgggtaaagacgctgcagcctgatggaggcagcaacctgctacaagctctgaagaagatcttcactctcaagggactggattccctggtggccatcatgagaagctgcccagatcagccttctgaaatcctgtctgactacatccagcagtccaccacgggaagagacctcatcatccacttcatcacctacagatgcgatgatcagatgccccctgctgtcctgaagaaccttgcagaagctgttaggggctactaccactgctacagcccaaagatggagcactacaccagccgggacatggatgagctcctggcagaaattcagaaggcccagagcctcctcagccacgtgcaagccctgcagcacagcagcccctgtgaggcgctcacctgcaccatggaggagccaagaaattaagtctatatcaggtcctggcacccaatgcattctctcctgtggaggaatttgtacctattctccagaaaacagtatcatcgaccatccatgagaaggcaatgatacaatttgaatggcacgacgggacagtgaagaacattcatgtggacccacccttcctctataagtaccagcaacagctcagcagagctatgcggatgtatgagaggcggattgagtggctctccctggccagcagaagaatctggggcacagtctgtgaaaaaagggtggttgtactgctcgatatctctgcgaccaattccatgtacattattcatatccagcactccctgcggctgctgctggaggagcagttacccaacaaggactgtttcaacctcatcgcgtttggaagcacaattgaaagctggaggcctgagatggttcccgtgagtcacaacaatttacaaagtgcctggcggtgggccctgaacctgcggtgtcggggcagcaggaacgttctcagcgccctgcggaaggctgtggaagtagacttcaaggacaaagacaaacaccaatcgcagggaatctacctcttcactgggggcatccccgaccaggacatggactggaccaggcacagagaaggccctggagaaacatggccaggctgggctgcccagagccccacagcttcaaggccctcagctgctggcccctcctaccttctcttccccaccagcctacactcagtgcctacatggctgaggcctgtggcggctgcgacctccagctgaacgtgtgtctcttctacgtgggcgagccaaagatggacaccacaccccctgcccgctatgccagtcacactgacacagccgccgcctacaaggaggtcacccgggctgcaggtggccgcttccactggtttggagacacaggcatttatgagagcgatgacatcaactccatcatgtctgagatggaaaaggctctcaactactcccaaaagtgtgccttcctcatggcctccctgaagaaccattcaggaaaagtactgggaagttcagccctcccg

SEQ ID NO: 2405 - DNA, 1918 bp, Homo sapiens
gtgttgggtttgggggacgctggcagctgggttctcccggttcccttgggcaggtgcagggtcgggttcaaagcctccggaacgcgttttggcctgatttgaggaggggggcggggagggacctgcggcttgcggccccgcccccttctccggctcgcagccgaccggtaagcccgcctcctccctcggccggccctggggccgtgtccgccgggcaactccagccgaggcctgggcttctgcctgcaggtgtctgcggcgaggcccctagggtacagcccgatttggccccatggtgggtttcggggccaaccggcgggctggccgcctgccctctctcgtgctggtggtgctgctggtggtgatcgtcgtcctcgccttcaactactggagcatctcctcccgccacgtcctgcttcaggaggaggtggccgagctgcagggccaggtccagcgcaccgaagtggcccgcgggcggctggaaaagcgcaattcggacctcttgctgttggtggacacgcacaagaaacagatcgaccagaaggaggccgactacggccgcctcagcagccggctgcaggccagagagggcctcgggaagagatgcgaggatgacaagagtctggctctgtggcccaggctgaagtgcagtggtacgatctccgctcactgtaagctctgcctcccaggttcacgccattctcctgcctcagcctcccgaatagctgggactacaggagcctaccaccacgcctggctaattttctgtatttttagtagagatggggtttcacagtgttagccaggatggtctctatctcctgacctcgtgatccgcccaccttggcctcccaaagtactgggattacaggcgtgagccaccgtgttcagcccacatgatactaattctcaatgggcagaatgaaataaaaccatttattgatatagtgctttatgattgttcaaagtttattatatgcataagtcatttatttgggaaagttgaataccatgtggtatgtgatagggatagaaagatagtaagattcccgttctttgaagaagtgagggaggcacacatagaaaaataatccataatgcatgattaaatgctatagtaaagctgcttacaaaggggtttgagaatacagaggaataactgattaacttcctcaggaagtcaagagcgaaataattcactgaaaaggtgatctttagtaatttaacaaaatgagaaagggataaggacaggaggaacataaatgaggccaggaaagctggaaagtatgttgtaccttcacagaaggtcaagcagtagaataggagagtgtaatataaggtacatggtattgagaagtaggggaaattatgtctgagttaaagctatttggggccagaataatgatgattattgttattactattttattgtggtaaaacatctataacaaaatttactatttttaccattttaagtgtataatttagtggcattaagtacattcacaatgttgtgtaaccatgattactaccatctatttctagaactttttcacgatcccaaaccaaacaaaacctctacccattaagcagtaattcccattgcccttccctccagcctgtggtaacctctattctagtttctgtgtctatgaatttgtctattctagatacctcatataggaggattatacaatatttgtccttttttatctggcttatttcacctagcataatgttttcaagattcatttatgttgtagcatgtatcagaacttcattcctctttatggctgataatattttattatgtgtatataccatgttttgcttttcattcatctgttgatgaacacttgagttcttcccctctttcagttattgtgagtaatgcctctataaacggtggtgtacaagt

SEQ ID NO: 2406 - DNA, 3339 bp, Homo sapiens
ttataatatttcttagtttgagcccaggtgcggtgtctcacgcctgtaatcacagcactttgggaggccaaggcaggcggatcacttgaggtcaggagttcaagaccagcctgccaacgtggtgaaaccctgtctgtactaaaaattaaaaaaaaaaaaaaaaaaattagccgggcgtggtggcagtcgcctgtagtcccagcaactccagaggctgagacaggagaatcgcttgaaccccagaggtggaggttgcagtgagctgagatggtgccactgcactccagcctgggcgacagagccagactgcatcttgtgggtgtaaaaaaaaaatttgtagtttgagagtcaactttttcctcacagtttctgaaaatgtggcccttttgatgctgattaaagctggttgtgattttaacaccttagtagccagaatcgagactgtcatggggacatttaaaatctcaccacacttgacaccattcacaagtagccatgtggctcagtctcctgagtgctcctgcagagtgcagctctgccaggcttttctctagataatctcgtgtgtgttactgtagcagtttgagtttaaacacaagagttcactcggttaacatgttctaaccagcaagatttctgttgtttgcaggtgccgtgagcgatgtggagatgcaggaacactatgatgagttttttgaggtgagagaactgaactctgtgactgatagacctgttgatcttctgtatctgtttggaaggatttaaaatgtttctctgctaataaacatacatgagttatatctaatgacactttgtagtgtataacgagtcttaaaccactgtggtctcccttcaggaggtttttacagaaatggaggagaagtatggggaagtagaggagatgaacgtctgtgacaacctgggagaccacctggtggggaacgtgtacgtcaaggtaggagccagggcgagacggcggcgtggccgcttagtgtgccggggccaaggccaacaggcgaaagcgagacagtggtgcagccgcttagtgtgccggggccaaggccgacagaggatggggtgcctgtcgccatgcaccttgagatcctggatgctcaggcgcacagcagggctcaggtgcactggctcggcgcctaccggctgcgtcatatgtggcggtggccagcccacacgtgcgcccagccagcagaactgaaggacggaccgtacaccacagccatcgttatttcagtgtagaatatttagtacctgttggtttagaagctgtgtggactaaggaaaagttaggtttactcacatgtttggtttcttttttcttttttagtgaataaaactttatttgcctacacagccatatttgctcctttaaccagttgaatttgaaaaatgaaggcaacatttggcaaaatcttggactatcttgaagttaatctcattgaaaataaaggatttttcaattatcctgtaatactattccaccttactatacctgagtgtgtatatctctctctgatacatacttggattggtaattgagaaagtcttattaaagcgtggatggcaagcacttctgtttttgtcttttcagtttcgccgtgaggaagatgcggaaaaggctgtgattgacttgaataaccgttggtttaatggacagccgatccacgccgagctgtcacccgtgacggacttcagagaagcctgctgccgtcagtatgagatgggagaatgcacacgaggcggcttctgcaacttcatgcatttgaagcccatttccagagagctgcggcgggagctgtatggccgccgtcgcaagaagtgagtattcctgtgcccgttgttaagctcagtggcttctttctcccctcacaaccctcccccttccaaaaaaaaaaattttggcataggtgtcgtttctgttttttaaaaggcagtgcttagaacatagtacatatttttaaatatccaaatgtcctctttggagaagaatattcacctgcacacaggtaacttcattatccaacttctcaagtagagatcagatcttagtaatcaagcaagagggcggttagctgggcagccgcggacatgaggctcgtggtgaaagtgggcatgcagtttattctcccagatattacgaagaagaagaatagatgttgtaacctcctttagatcagggatggcttccctgggacacattggaagaagaattgtcttgggtcacaaataaaatacactaatgatagctgataactttttttttaattgcaaaaaaaatctcataatgttttaagcaagttgatgaatttgtgttgggctgcaggttggacaagcttttgctttacatatttcacatgtccactggggtttcttttggttttgcttgttggttttagggcatttcattatgtcttgggatcgctggcatcctcccttcgggacactggcagaatcaggcccagcggtcacatctctctgatcctacatttaaatgtacgacaggtcacagagcagagaaaatcaagacgtcagaatcgaaccgattgagttctgagtctggagaggttctcatccctcttctgttaaacatggactagtaaatagatgggtggcgattgttttattgtcagcattcaagaagcataagagaaaaacaggcctgctctccccagcccaaaaacctgatggacacagtagctatgagcgcctgaagcgtggggtcagtgagggttgaagatggtatgtgtccagctcattttgattatgatttcctgtgaccatttgagttggttctagaagaagacagaagatgcaaggtattacacctgttcacttctaagttgcacatttttttctcctgaaacttttcacacctgaaatcagggtgtgtctcagtcacagcgtgcagtctcttcagtgtttttccttatcagtgccgttggcttgaggagctgcgcgtgttgagagagtgggtgtggttctgtgctgcgtgccgtggtttggatggcacggttttctttattttccttggttgcaggcatagatcaagatcccgatcccgggagcgtcgttctcggtctagagaccgtggtcgtggcggtggcggtggcggtggtggaggtggcggcggacgggagcgtgacaggaggcggtcgagagatcgtgaaagatctgggcgattctgagccatgccatttttaccttatgtctgctagaaagtgttgtagttgattgaccaaaccagttcataaggggaattttttttaaaaaacaacaaaaaaaaaaacatacaaagatgggtttctgaataaaatttgtagtgat

SEQ ID NO: 2407 - DNA, 3417 bp, Homo sapiens
tggagtttttaggaagacagcagtggtcatcttttgcccccagcactacccagagtcacctaggaagaccccaggggaccaggtatgcagtacaggaggtgcacagtcattgccacacagtcctggagtgcaacagacagtggagcctcagcaggcagcagtgggatgagtggggctcctcacaggaacccttctttctttggtcaggaagacgctgccctttaccgacacctggggacccttctccggcactgtgtgatgatcgctactgctggagaccgcacagaggagttccacgggtgagaatggggctttttctgggagggaagtgtgcccacatgtctagatggtcgtcctcaaccccggctctgaaccagaaccacctgagagcccaggccccaccctagagagtctgacgttgtctgggtgagtgagactggacatagccatgaatttgggggcaggaatgtgccaactgggccttgggtagtggcaacagtatggtacttactagggcacattggttccttgtccctgtttttggtctacctgcccctaggctggtctgggtttccagagatggtctggcgctttggctcagacagggtcggggaggcagtgtgtctcagtgcccccacttccccaggggaccccactgtacagctgagtggcagtgcctctcagatcagtccctgcccttggctttggtccctagcgctgcccctttgggactcagatgccagctcatgtaatgtgtggttcagcggagtcacaaagattgcacctgtgctcagggattagccctgttgaaacccctacctccatctgtccccagccacgcagtgaacctcctggggaacttgcccctcaagtgtctggatgttctcctcaccctggagccacatggagactccacggagttcatgggagtgaatatggatgtgattcgtgccctcctcatcttcctagagaagcgtttgcacaaggtaggctggggatggctgtgcaggctcccccagtggctctggcactggttctcctgcacagatgtggtcagtgcttccacactgtccacactggtacatggagattgtcttggtggtgtgatatgggcgactcttccggttgttctgtggtccagcctggcaagaagccagacccttcctccatgagaagcatgtggacaccttccacacacttgaaggtttcacttcttaaatctttggggatctttactgagtggtccagagaagccccccagtccctacttttaagtcttaaacacaggcagcccttgattacaagcatagttgtccctcagcatcctgaggagacccataggaacctcagatcaaagcttccttctgattgctgtgactgcactacagggcatctggacagctggggctctaaccatcttccaggagcttgcagaaagcaggctggagtacaataaaccgagatttagtagacctcctgggaatctacctgcctaagcaagggacacacaaggtgcctgcgagccagtcaggatagggagctggcactggacacacagctagggggttgtctgtgcccgtcgctgccactgctggtgctggggtccaggcacattatgctaggagggtcaagaactccctgctctgtccacgaagtacacagagcggggattcggttctcgtttctttttgccaccaacatctgagggcaatgtgtgtgcgagtctaaagctttaattgctttgtgttttcttcccagctctggtttatagttgaagtaattagacttaaagcagttatttctcccaagtcacaaagcttacgagtacctctgagttacgctctatccctgtccttttcaaaagtgacacagacacccaccacccactcttggccttctgctgactaactgcagaggggcctcttcccaaacctctgccgccaggaccagctgttgtgtatgttggtgggaaggggtggtggggaggtgtaactctgtgccagtcacaagttaggcaggggcatagccccagtgacagagaatcctctacagacacacaggctgaaggagagtgtagctcccgtgctgagcgtgctgactgaatgtgcccggatgcaccgcccagccaggaagttcctgaaggcccaggtataaggctgaggagctggtgctcctgggggatgtggtttcggccctgatcacagacccttggctgctctaagcccaagcttagggatggccacctccccaggtgctgccccctctgcgggatgtgaggacacggcctgaggttggggagatgctgcggaacaagcttgtccgcctcatgacacacctggacacagatgtgaagagggtggctgccgagttcttgtttgtcctgtgctctgagagtggtgagttatggagacccaggtcccagcccaccccacctcagccaggcttgcacactgacctctgccttgcccctcagtgccccgattcatcaagtacacaggctatgggaatgctgctggccttctggctgccaggggcctcatggcaggaggccggcccgagggccagtactcagaggatgaggacacagacacagatgagtacaaggaagccaaagccaggtgtgtacccccaacacaccctcgggtctccactcacagccccatagtccctgcttccacacccatgtggacccctgtagggtgggacaggatgacaaatgggcaagagcttccagaatcaagcacctgttcctaagtgctatctgggataccagaaggtggcagatggcaggagctggttacctgtgccgcttctggagggaggcctcttcctgcagttgccttgcccacctcaccccactgggaaaataggtggcttgcctcctgtcctggagagtcactaatgcattccccacattccacccactgggaaacagcataaaccctgtgaccgggagggtggaggagaagccgcctaaccctatggagggcatgacagaggagcagaaggagcacgaggccatgaagctggtgaccatgtttgacaagctctccaggtgtgtggcatgaggaggaggggcctgcagctgggagaagggagagctgacccacatcctgtcttgtgagccccaggaggtaggatcagaggagagcttaggatcctggtattaggttgcattgctcacgtttgaaatcacttgccctggaggaaatcccccaggggatgggtatattgagatcagtattgtgccccttttacagatgataactgaggcccagagaaattaagagactgtctaaggccgggcgtggtagctcacgcctataatcccagcactttgggagactgaggcaggtagagcacaaggtcaggagattgagaccatcctggccaacatggtgaaaccccgtctctgct

SEQ ID NO: 2408 - DNA, 2608 bp, Homo sapiens
agaaggctggagccaacaggaattgcttccatggtcatggaattttactgtttacagagacctccctgggagggctaactgggtcatacctgctttgggactttggggctcagaggcaatggcaacatcacatttgtccttgtgagatgagtttgagcggtggctgacacctgccctgtaccaggtactaaatgtggttctggggatactatcaccagtgagctgccctggaaagctcattgtcggcagaggaaacaggagaaaacacgcaacaatacagtattccaaacagcagtgggtcactgtctttactttaggattcataaagcctgttaatgaatgggtgtgctgggggcactgtcatgttcttcagcatgctgcctgggcgacgaggaggcccttcctagggtctgacctggcttcccttcccaggtgggtgcaggtggcatgtccacgtctctccattgactggggcacagccttccccaagccgctgctgacaccctatgaggtaacaccaagctctgggagagagtgggctttggacgtggttctcaaaggtgaggtctggagtggagtggggtgggtgggcagcacttcgttatgttcgtagattccggagtctgtctcgatttctccagcggagtcacttcctagctgtgtagccttaggcaaggccctgaaccacacagttcccttctgtggcaggggacagtgtgcccttcacaggccgtcgtgaggactgaattcagtaatccaggggcagaaaaacactggcagatgttattgtccctccctcccctcccctaggcggccgtggctctgagggacatttcctggcagcagccctacccgatggacttctacgctggcagctccttggggccctggacggtgaaccacggccaggaccgccgtccccacgccccgggccggcccgcgcgggggaaggtgcaggaggggtccgcgcgtcccccttcggccgtggcttgcgaggactgcagctgcagggacgagaaggtggcgccgctggctccttgacgcgctcccgggcctcaggtatcagcccccgctctgggtgcgccccgccttttgccgttgtcatgggaacgccttggcgctccgaggcccgccctcggggcggtgctgacgttcggttccgccccgtgcattgtgcttccgctcggggaaagaccgcttccggtgcttccgtcgctccttgccgggcataatggccgcgcagcgacccctgcgggtcctgtgcctggcgggcttccggcagagcgagcggggcttccgtgagaagaccggggcgctgaggaaggcgctgcggggtcgcgccgagctcgtgtgcctcagcggcccgcacccggtccccgaccccccgggccccgagggcgccagatcagacttcggtgagacaagccccgctccggaaacgcactcagtttcctccatcttgtttcgtccccctcgacacccttcagcatcccccaccctgcgtccacccgcattcctcccacccagtccacacccttcatttctcgcgacccataccctctttgctcaaactgcagcctgtcctcccaggcttccgccttcaccgtcttcctccgctgtctcctgttcaggccaatccactcatttcccccctctcatttcccccagacttttgcctcgattccctttttctctctgtcatctcgaaccctcctgccctttctcatttctttccttcctggagcctcccatgccctaatcccatcctttttcctcatatcgctgtagggtcctgccctccggaggagcagcctcgaggctggtggttttcagagcaggaggccgacgttttctccgcattggaagagcccgccgtctgcaggggcctggaggaatcactggggatggtggcacaggcactgaacaggctggggccttttgacggccttcttggtttcagccaaggggctgcgctagcagcccttgtgtgtgccctgggccaggcaggcgatccccgcttccccttgccacggtttatcctcttggtgtctggtttctgtccccggggcattgggttcaaggaatccatcctgcaaaggcccttgtcattgccttcgctccatgtttttggggacactgacaaagtcatcccctctcaggagagtgtgcaactggccagccaatttcccggagccatcaccctcacccactctggtggccacttcattccagcagctgcaccccagcgtcaggcctacctcaagttcttggaccagtttgcagagtgaaagatcaagaaatgtctctgctcctacatccagctcctctaggggcagcctccgtcatccatgccctcccaggaccctccactcactgctgtgagtgcgcctcaccagaaccagttaagagacaactatcaattcttgagacccaaattataagggccctgccctgtactgaagaaaaggggagcacaaggccctaatggacattgacttgtgaaaacgcaaacatgaatatggttggagagccctggattaggagggtgacatggggaaggcagaggctggcaccatggtgactgccacataataaagtggtgatttgg

SEQ ID NO: 2409 - DNA, 1301 bp, Homo sapiens
aaaaaagggggggaaagaaagaaagagaaaaaggagggcgagtggcgagcaggggcctcggccgccacccacacgccccgaagcgtgctcgtcccccgcgcggggctcccggccgccgccctcggccatcggctgctccccggtggcccaggcctcggactccgcggccggcccggcgcggcccagcgccctcagggatcatggcccaggtagcagtgtccaccctgcctgttgaagaagagtcctcctcagagaccaggatggtggtgacattcctcgtgtctgccctcgaatccatgtgtaaagaactggccaagtccaaggcagaagtggcctgcatcgcagtgtacgaaacagacgtgtttgtcgtcggaaccgagagaggatgcgcttttgttaatgccaggacggattttcagaaagattttgcaaaatactgcgttgcagagggactgtgtgaggtgaaacctccctgccctgtgaacgggatgcaggtccactcgggcgaaacggaaatactcaggaaggcagtggaggactatttctgcttttgttatggtaaagccttagggacaacagtgatggtgcctgttccctatgagaagatgctgcgagaccagtcggctgtggtagtgcaggggcttccggaaggcgttgcctttcaacaccctgagaattacgaccttgcaaccctgaaatggattttggagaacaaagcagggatttcattcatcataaataggtgacacactctgcacccccgccccttcagttcatttaaagatgaaaccaatagcctaattttaattcactcgtgcatcccgcctgctgcgtttcagagctgactgttcagatgtgtcatgcttttttcattggtccgtgctgggtaatggtgttgcttttcttgcagacccttcctaggaccagagagtcagctgggtaagtgacagcttctcaggtttggtggctcttctgagctgctgaaccacttcttcttcattaaaacttgaattgggggccgggcgtgatggctcacacctgtaatcccagcactttgggaggctgaggcaggtggatcacaaaggtcaggagatcgcgaccatcctggctaacacggtgaagcccagtctgtactaaaaatacaaaaaaaaattagccgggcgtggtggcaggcgcctgtagtcccagctactcgggtgtctgaggcaggagaatggcgtgaacccgggaggtggagcttgcagtgagcggagatcgcgccactgcactccagcctgggcgactgagcaagactccgtctc

SEQ ID NO: 2410 - DNA, 2215 bp, Homo sapiens
actctgggtccagggacagcactgaaatccacacctttgacctgtgtcactggaagcacctgtcccagatacattcactttgacttgcgccttgtaaaacccacattcccttggctggttttactgacccttttcgtaaaagccctttaatcagtgtctatggccagcacccctcagggtggaagattaagatgaagacgtgatatagcatgattcaacctgtgcccagactgacctccctacatgtcacttctgccatgtcccctccttgctccagagctggcagggactccccagggctgccaccacatgtccaggcgcctctggctacccctggcagctgtcactcctccagccctgccccacactcctgccagcctctgcacctgcctgcatgtcctccgcccttccccggcacccaccctgagatggagccccctttccttccgacaaggtcccgccagccctcccgaggcccacccattcccccctcctgtggctcagccccacgtgccactgtcctggtcctcctaccctggagggctcgtgacgttggccctgcccggcattattcagagcggtgctttccagactccctgtgatggacagttttgttttgttttttaaatttccagtctgtggcagactgatcgttttatataaaagacatttaaaatgtcaccgaaatgccgaatcgctataaaagtttctaaacacttattctcgatttctgtaattgcctcactgtgcaccagcaacagtttgcaaattggcaacgatccctgcagctcacgctgcacagaacgggcctggacagcctgtgcctggtaaataagctgacaggagatgctcgctccagccccccagggccacgcgcacagctgtcagaggtcaggagaaccgaaacacctcttttacaacctcatacaaatcaaagaagcaggaaggagtaccctctttgcacacaaaactttacagacttaaatggtaaaggcctcattttccccgagggagatataaaacattatttccctgagtgaatgcctgcctgtccccaaatttgaaaatccgtggtgagcacacggtgcatgggatggcccagctgtacctgccagctggggccacggtgccaccctttccccacaatacaagcaagatcaggacgtgaaactgagcacttcagaggggggacagcggcaaggacagtggctttctgtgttacagcatgagctgcccccaggattcggctgtcatagacaccatgcagctctgccctctccacccctgtccccgtctgtcatgcccagaattgcatctgccctgcagaaaatatttcagaatctttcaggagccaggattcctttttttttttttttttttttttttgctttgacacagagtcgctctgtcgcccaggctggaggtcagtggtgcgatcatggcccactgcagcctcaacctcctcaggctcaagcgatcctcccgccccagcctcctgagtagctgggactataggcatgcaccacaatgccttgctaatttttgtatttttttgtagagatgggttttcgccatgtggcccaggctggtctcgaactcttgagctcgggtgatccacccacctctgcctcccaaagtgcttggattacaggtgtgagccacagcacctggccccatgattacttttaaaggttgaaaaaagtactacttgagtcattgagaagtagaattacagatttgactttttccttttttttttttttaataccttagcttttttctattttgcgtattttccacaatgagcatttagtgaggttaaggggtgggtagccaggtttttttcacatcaattatcctaagagttcttcaacaaaggaacaccaaatatacattttccacatcttttaattcttttattaaataaaatactggccgggcacagtggctcatgcctgtaatcccggcactttgggaggccaaggtgggtggatcacttgaggtcaggagttcgagaccagcctggccaacatggtgaggccccgtctctactaaaaatacaaaaatgagccaagtgtggtggtgcccacctgtagtcccggctgcttagggggctgaggcgggagaattgcttgaacgcgggagacggaggttgcggtgagccgggatcgcgccactgcactccagcctgggcgacagaccaaaactctgtctc

SEQ ID NO: 2411 - DNA, 2929 bp, Homo sapiens
tcttcccggaaaggcagacagcagccatacctattgggtagggctggccagctagctctgggagcagggcgggcactcagcgggtatcattgctgttaccgcagctcccccatttccagattacgaaactaaggtccggagactcgcctggggccctggggaggtgacaggagacggggtgctccatgtgcagtgggctgcctggggctgctgcctcaggatgggcattgggcgtcctgccccaatgagcgcctgtttgcctgagggctggccatgggctccctggagggctggcgagaagcctggcattgggctttcactgcccagccagccctgttctgccctatgagggcggctggcgcatgggctttgtgatcccaagacagggctcaggtccagtgacgtgccaggcacccagagatccaccagtgcagctgggacttgaccttagggctccatctgcaccgagtgggagggcctgggcagtgacagggcaaggcgggcccccatgctcatgtcccacagtgcctcactcgcatgtcctctcctccccacagtggacagacggtccaccccccgtgcagttccaagctcagaatggacccaacacccgcctggccagcctcctgtgaggccttgatggggccatccagctccgcagggcctgcgcgtctccggcttccacccagacggcactcaagcctgcccccgaggcgtgcttccttcctgattgtctctagagcttccaagtcctgggaatgtgcggggccagtccctgccctcccaggaggggtggtagccgttcccacctcgcagcaggacccccagtgcagaggctcacaggtggcacacaggcgctgtctctccagagccatccttcagagtggacctcagtgccagtcctgcctcagcaactgggtcacgtcggccaggaatagggcgcaggcctccagcaggtcctaatcctgtgtgccagggcaggcagtgccccaggggcaccacgcctgactctccatcacccaggccttgatgccgagcgggagtagagtgtttcctctgctcaaggcaatttccagagcccggatgccagtttctggcctgaatttggagggaagaagtaatggccctagtgtgggacgaagcacagatcccagcacttttcccagctttctctccagcatcagtccctgcagcagctggggcctctggtcaggaaccctcagggacccaggaactcagcttccaaacatctgcaccttgaccggactcgccatcccgccgtgggggtgcaggtgattgtaaacacgggtgtgcatgtggatgcacacgggtgtgcggtgaagatctgtggagatggagctgggagctgaggctcctgttgcaccagccaccttcccccatcttgtggctgctgaggggcaggaagcgggggagtgggctcgtctcctaaatttaagatcacctcctcagctagcttagagtgcgtggcacgggccccccgcccccgagatctggagcccagggactttcttcctggcagatctgtggccttccctgctcagcctcttggtccccccactccctccaccgcctcaccttccctgctgggtctctggggcacagtgtgaaacccgcaccctagccaggccccagggagcctccgctgggcccagacagcagcgtttggttttatccacttttcttggataatcaggaggtgccccagtggtcacagtgtggcattccgagttggggcgggtggtcgggtcaagatagcagcagcaggtgtcagggctcaagacaccaccccctccagcttctggggcccaggagcctctccctgctacagggggtgggggtcctgctcagcagggtaggtggtggttttaggtcttgtcaccctcactcagtggaactgcctctgggagctttggcgtctgtgactaaagggacgctggattgctcaggtcagctgctcggggctcccaggctgggtgtgccttagccacaggcagggctgtcaataacccccttcctcactggccaccacctgacatcagcaccagtgacaggctggtcagagggcggggctggtgagggtttgtcctaagaggaccaccgccatctctgggtctccagggggagagcctggccttgtcctttgctacccagggctgcccccaggcccatgaagccaataggagagcgtgtggcactggcccacaaactgtccctgtcctgtcttcctcccgagccatggcctctgctagctccaccttgaaggagccccccacatcctcccctacatcccagagatgccaccacttgtgtctccacaatgtgctcctgcccacccgggttccgcactgtccgacccctgcacaccactcatgtcaccacggcgtgcatcatgttcatccccatctatttatttaagcctttctttgcttgtagggcattttgtatgtagagcagttgaaaacagaacctcagaacttaacatctgtcctgatgttaaagtgcttttcatgaccgccctgttatctatgtatatgtaaagttaagaatgagatcttaagtttacaattaaaaactcagtactcaatatttaatattctactcgagctttatggaagccaaatcatgtgcatgtgtgtgtgtgcgtgtgtgcaagctttgaacctccttccacagccgcatcttctcatgacacaaagcttttgataagtactttcctgtgggtcgctcagggcctcatagcatctcattcaattacaagaatagaggccagacacggtggcgcatgcctgtagtcccagctaactgggaggctgaggcaggaggatcacttgagcccaggagattgaggctgcagtgagcatgatcgcgacactgcgctccagcctgggtgacggtgagactttgtctc

SEQ ID NO: 2412 - DNA, 2134 bp, Homo sapiens
actgccctggcttcctgcgcctcttcaggtcatcgcttgctctcgttcccaggctttggcctctagtggacgagaatcaccgagtctgcggggctggacgctgactgcccgggccagcacctaggcgggcgggagctgtgcggcccagggttcacgcgggccgggtagaggctcgagccgggacccccgagcggatctgggccccgagaaggacccccgcctggatttgccccgtaggcccggcccgagcccctcgggagcagaacagctttggtgaggtggacaggaggtgacctcgcgagcagacgcgcgcgccagcgacagcagcccgccccggcctcttgggagccgtggggcagaggctgcggagccccaggagggccggagccctcatgacttcagtgacctgcttctgcccctctaggtctatcagccacagtctctgcaagtttccaagagcagcagaaaatgaacacattgcaggggccagtgtcattcaaagatgtggctgtggatttcacccaggaggagtggcagcaactggaccctgatgagaagatagcatacggggatgtgatgttggagaactacagccatctagtttctgtggggtatgattatcaccaagccaaacatcatcatggagtggaggtgaaggaagtggagcagggagaggagccgtggataatggaaggtgaatttccatgtcaacatagtccaggagattgtcagaaatggaggagggggcaccagatccaaggaagtgcccggacaaagccgggaggcgaggagagccgacggggaggaggtgccgagagcatcagcggggctgctcggtggcacgaagacgcccgcggggactggagaggtcggctagggccaggctactcaggcacggagggccacctccccttcagggacgtgagcatctagctgcactgatttgttgttcaggaacaggaaatgaaaccccgcagctttgaacacaataacccacgccagcctcaggctcatgaatattcagcaggctgcttgcgccttgcaaccccgcctccgttcccctctgctcgccggcgcgcggctgtgtcgtcatacttgcgcgccgacgccgccgctcgcttgtgaaactggaaggctgccatggctagcccagccgcctcctcggtgcgaccaccgaggcccaagaaagagccgcagacgctcgtcatccccaagaatgcggcggaggagcagaagctcaagctggagcggctcatgaagaacccggtgagacgaggcccaggctccacggcccgtccgaggcccacccccttcctctgcagcgcttcagggttcccgcaggtccaccttccccgcctccaaactcagaaactcagtatccgaccctccaagagcagtctttggggaggaggaggagaaggaggctgtcccggagatagtgaacttcccgtctgtccttgtgtgagagcccagcttgaatcaaagcacggtggagcggcttcccgtgctccaagaccccttctggtttaactttctgtgaacaaaaagcgttagactgaaaaggtagaatttgtgggttagcaaaagggtatactctaaacaacactgatcgttagagagacagtggccgagacgtttggagctggtcactcctctcccgctcacaccccctctgggcctcggtcccctcaatcataaaaacaattgaacgggaacgtcctttatacctttaactagaaaagcttgactcttcttatctagtagtgttaaagttggcggtttctagctggaaactatggcttaggtttttcagttctgctctggaaagcgtagccctgggaaggtgtggactgtgttatacccaagagtacataggatgaaaaaagccacgacagagggaagaacacaaaatcagctctgtgtccaagtagcaaagcagtcctgcttcattagtcaattaaaattctttggtcttaagagatgtaacttgggctgggtgctgtggcccctgcctgtaatttcagcgctttgggaggccaggcgggaggatggtccgaggccaggaaggagttcaagaccagcctgggcaacatagtgggtccctgtctttacaaaaataaaaaaattgcctggt

SEQ ID NO: 2413 - DNA, 2591 bp, Homo sapiens
aaagcgaggagaggaggcgtcagagagcgtgcctgcccgccgcacacggggctggtttccggagtgcgtctctagagggatgcacgttgccttagccgagcttcggatagaagcctgatatgtaacccaggcaggtgggagcctcagtctgtcgggctgaggtctggcatctacaaagcctcttggccgtgttctgaacttgaagcctggaggagttctctgctcagcacagccaaggaacagaattagaagaaaaggaaccctggcctgaggcaggtgacaaacattaccaccccagctgtgcacgatgcagcagatgcaaccagatgttcacagaaggagaggaaatgtatcttcaaggctccaccgtttggcatcccgactgtaagcaatctacgaagaccgaggaaaagctgcggctgccaaacattcggcgttcttcatccgatttcttttattccaaaagtctgattcgacgcacaggacggtctccgtctctgcagcctaccaggacatcctcggaaagtatttattctaggccaggctccagtattcctggctcaccaggtcatactatctatgcaaaagtagacaatgagatcctggattacaaggatttagcagccattccgaaggtcaaggcaatttatgacattgaacgtccagatcttattacctatgagcctttctacacttcgggctatgatgacaaacaggagagacagagccttggagagtctccgaggactttgtctcctactccatcagcagaagggtaccaggatgttcgggatcggatgatccatcggtccacgagccagggctccatcaactcccctgtgtacagccgccacagctacactccaaccacgtcccgctctccccagcatttccacagacctgatcaaggaatcaacatttaccgaaagccacccatctacaaacagcatgctgccttggcagcccagagcaagtcctcagaagatatcatcaagttttccaagttcccagcagcccaggcaccagaccccagcgagacaccaaagattgagacggaccactggcctggtcccccctcatttgctgtcgtaggacctgacatgaaacgcagatctagtggcagagaggaagatgatgaggaacttctgagacgtcggcagcttcaagaagagcaattaatgaagcttaactcaggcctgggacagttgatcttgaaagaagagatggagaaagagagccgggaaaggtcatctctgttagccagtcgctacgattctcccatcaactcagcttcacatattccatcatctaaaactgcatctctccctggctatggaagaaatgggcttcaccggcctgtttctaccgacttcgctcagtataacagctatggggatgtcagcgggggagtgcgagattaccagacactcccagatggccacatgcctgcaatgagaatggaccgaggagtgtctatgcccaacatgttggaaccaaagatatttccatatgaaatgctcatggtgaccaacagagggcgaaacaaaatcctcagagaggtggacagaaccaggctggagcgccacttagcccctgaagtgtttcgggaaatctttggaatgtccatacaggagtttgacaggttacctctttggagacgcaacgacatgaagaaaaaagcaaaactcttctaagtcccactcgtgaatggcaattagagaaaggactgacagtggcggtgccccataggatgtcatattgaggcccaaacttgattggagaatttgcaaactaccgtcgctcagcaacaccaaaaagagaaagtctggttaaaacaccatgagtcaaatgtcgggccagccaacagtaacacttgccaagaagcatggcgtagaaatttctatgttccgaaacacagagtagtgtccacatgtgagcttttcacattaccttatgtatacaacaggagctgcgttgttttcttctttttcttttcctttatctgttgtccaacaacagtgctgactgtccggataagagctggcaagtgcccttaggatgccgcatgggaaaaatcggttatcataatttcaaagtataaatatatttattaagtagcgctgcggctaagaaggaagagtgaggggtctgtccatggggtggcagtgatttcacacccgcctttcttgaatggcttcgtgttactcagccgtgccctggcaggaatggaactccatcagggaacagggcagctctgtttgaatggggtgaaaaacagcaaaattaattcttagcaagctccttgttctctactgttcaccgggacctggctggcaaatgacttagctattagtatatttaaaaactgttcaaaagcaaaagagaaggaacaggaatgaaaggaaaccttcccttaactctttctgcttcccatagcaggtctggttcctgctccccgcctaggacaggagctgtctggagctccacctttgcaaagaaaggaaaaacacaaattgcccccagattggcccagtggcatgccattaggtgattttgcataggggccatatcattcatggccaaaaaaaacc

SEQ ID NO: 2414 - DNA, 1915 bp, Homo sapiens
cttgactccgctgctcgccatggtaagtccatcggcccccatcggccccggggtggcttcccaaaacccgaggccgctgccaggaaatgcctgggccgcgcggagcgtcgaggggcgggagccttttaaaggctttttcaagaaaatatccagttcggccactgttgtctttcgtggcctggagggaagctagtgagccagcgagcaacctggagagggacgggctgcgctgcggccgcggattcaagggggctctttctttgcccggccgctgccgagtcgggcagggattccggtttcccttcgcttgtagcgaactcgttctggaggcggggggtgggaggtggcagccacccccgaaatcgtggcctgactgttggctgcccgtggcatgcgcaacgtggagggtaatcaggagggtattgtgggctactggttttcgaaaagggtttagcttggcgtggagaagcgaaccgcatttttagatcccaggacttttgtttagaggacgtttattcagagacttgagcgtcaccccgtggaagcgcctagaacaaggggtgttttgcgaacctgtgtgtcattctggccttcttagtaaatggcagcagcgaaccagtcactctttactgggaaatgtaaaatgttgatttctagatatggaggcgataagtactggtattttattacttgtcaagtaatttattacttgacaaaatttacaactgctactgtggatgggggacggggtgtaatctttgccttctttgtattggctcccattattatgcaagggtatgttcgtccaggttggccaggcattaaacctgcatccgtgccaattttgcaagattattctgtagatttgggggagtattggggttggccttagatgaaagccaaaagatgcaactagaaattgagacagtcatccttggaaaagtgacatttcatttatttttaaatttaaaagtttatttttttagccagtgaaatttagcagtagagatagagttaggattaataccgaaatggtgagtaggttagatcttctgaatgtcagggactttccctaagtcttaattaccctcccaataacacttgaaaagtacgtacccctgttttacaaagtagagcactgagattcgttgacttgcaaatggtaggtaggtggttctgtttgactcaaagctgtgttcttcccaggaagccagattccctagccattcccagtgtggtcgtctgagtccttgggggaccacagggtaaattgaaaggtagcctctggctgtggagcagaaaggacctgggtttgaatcctggttccgcacattgatgctctgattttgtgcatgtttcttaaccggattccacttattttatctgaacgatggaaactgtggtatctgcccccagagaagttgtgagggtcagagacttgcttggcttgatggcttagcattgagaagattttggggctggggtatgtgttaagcactcaaatgttggtttgaaggagttcttgactttgaatcattcgggcaggctctaatattgtctaaattgattgcattttcttcccagtcttctcacaagactttcaggattaagcgattcctggccaagaaacaaaagcaaaatcgtcccattccccagtggattcggatgaaaactggaaataaaatcaggtacaactccaaaaggagacattggagaagaaccaagctgggtctataaggaattgcacatgagatggcacacatatttatgctgtctgaaggtcacgatcatgttaccatatcaagctgaaaatgtcaccactatctggagatttcgacgtgttttcctctctgaatctgttatgaacacgttggttggctggattcagtaataaatatgtaaggcctttcttttt

SEQ ID NO: 2415 - DNA, 2668 bp, Homo sapiens
attcagggaataaataataaggccaggtaagcagctcagtgttgtggtacggccagcacttctggtgccttctgcttcaagttagcaaagcaggcagggtccgcctgagaaggtaacatctcagcaaagacctagaacttcaccagctttatacggggtttctttttcagaacacattccactttagtgaggcttggaaaatatttaactcctgtaatcttaaagtaaatggactggaagtgcagcaggcttggctcccacgcagcactaaggaatcactgggagagtgtgcagggccctcctcagagacctttctctgttttcccagtgaggagacgcaagcctggttctgcaattctttccagctctggagtctgttatggttcccatctgagctctaaaggtaggggtgggcctgaagaccctccacactgtcagtcctgtggacgtggtgggtgcccctctagccaccactgtcctccggactgtgccacatcacaagcacttaccgagctcctctacaaaccacgtgacaaccaaatgcagtgaaaactgcagccccccaacctgctcctgcccattgtgttttctgtggatctgtctggagtccttggagactcctgagcatgtgcactggcagagctgcctgactcttccctggaagaagttcaaagagggtagccacgtgttcagaccaggccatggggtctgggggctccgcgactcctgagagcaattcctggccggactctggctcatgttactgcccccacctccccccgcccaggtaaacccgggggtgcagacaactgttgttgaggtcccaggagcgggttgtcccctatgctcctggggacatggaggagagggagggtcccaggatcccagtacttgtatgagtcgcactgattagctgaagcccagaggcttcttaatcatcctagaaatacagcctcccgggaaatgtggcctggctctgcagctctgggtggctcgtgctctccctcctgtgtggaggggtcctggagaggttgggtgagctgattgataggtttcatgtgcaaagatgattattttcctgttctcaagtaacccaacttttgctaggaaactagaatcatctaatgttgcatagtgaagttctggggaaaatgttttcttccttaaatctgaggagagagatgtcctaggaaggtagtcttcaggctcactcttgattccagagctgggtttcagcacacgcagtcccctctccctgaagagtcctggtgggaccactcggaggtgccagctgagccagtgccacctttctggggaacccggacagtccgcggcagtatgttatgcactccagttctcataagcctcgcatactggacacggcctgtctgcagggagggagatctgagaaatgttagtgggaaataggaccgctggtgtccacatgcagggagttgggcttccttccctggcactggaatccttgctgtaaccagccggctcagaggcagccgtgcctgcagggggagtattagaaactgattctttgctaggtctttgcaccttcgtatttcaaaattctcagaccctagggtacaagtagccagatatcttcacaaatgtgcatctttttagtttttgttttccaggagatgcttggagcaaagtttagtccttggtgcctgtgacagacagggatttcctatggccttgggctgaccaaagctgctcagctcctggaggtggctgtttctggatcttgctgtgtgggggcctcaggtcccatgcctttcctctgcagggcctttggacagtcctccgggtctaggccacagcccttgggatgcaaccacagggacgtgggtgtagagtcctgcttgctgggcctgcagcctcctaatgcgccctcagcgaagagttcacatgcttttcttggaatgtccttcctcgctggcccccagaagcctcctcttacttgctccgccaagtcctcagtgcgttttcctggctgagagcttttcacgtcgcatatccaaggccattctgcagcagcctctggtcctcagctcagcagcagaggcctttgatctctttcagcgttgcctctcttggctctctgccctcagaacaggccggtcttcgagaccgaggcagccccaggtggaggttactgtgcaccgttaacgggtgatctttctccatcccaggtcccaggtgtgtgatggcggctgcaatctgtcttgtgggtattaatgcaatcttcagtggtggctactgttctctagctgttctacaaaactggagcatgctggcttgaaaaacccttgcccagttttgatcccttcaagactttgtcacagcctctatcacacatctgtttttctcgaagaaaaaaatataattaataaaaatgttttactcttttacactgtataattgtaagaaatagcgtattatttgtgaatgcatggtctgaaatttctgtacagtttggagatattttcaaacgaaacgtaagagaagtcaacaataaaaccaagaaaagtgagtatttttataccaaacattttaagtatgctgggatggacgatcttacactggtttggatcacagtttttgttcttgacttttgaagcttgtaattaaaaatatctatttttttcctctg

SEQ ID NO: 2416 - DNA, 2793 bp, Homo sapiens
cccttcaaaaacactttaaactttgtagagataaaattctcagatgtattccacatttaaccaggccccactcaaattattcctttttgctgaatatgaaacaatttattatttgtttcgtatagctttattttttgagagtctcgctctgtcgcccaggctaaagtgcagtggcacgatctccacccactgcaatctccgtctcccgggttcaagtgattctcctgcctcagcctcccgagtagctgggactacaggcccgcaccaccatgcccggctaattattgtatttttagtagagacggggtttcaccatgttggccaggctggtctcaaactcctggcctcaagtgatccgcctgggtcagcctcccaaagtgctgagattacaggcatgagccaccgtgtcggtcctgttttgtgtaactttagtttggctacatcttttcttgcacctctccttagacaaactgtacactaattggaaatgtaaactttaaaaagcatttgggaagtagtttttgtgcagtgaaaaataattttaaactgaacagaaattattttctttaggattcacctaaacaatctgtttggctaatttaaattagacaagactcaaactcagccagtggggaggacttgcagacgctggatctcgggagagggctacgttggagaagtttaaccgaccccaaggcttttaccctcatcggattcttttccagaatgcccagggccagtttttatttacattcgttttatttattttatttttcttcatcttttttgagacagagtctcgttctgttgcccaggctggagtgcagtggtgtgatctcggctcactgcaagctccgcctccccggttcatgccgttctcctgcctcagcctcccaagtagctgggactacaggcatccgccaccacacccggttaattttttgtatttttagtagagacggggtttcaccgtgttagccaggatggtcttgatctcctgacttcatgatccgtctgccttggcctcccaaagtgctgggattacaagcgtgagccgctgcacctggccaattttattttatttacattcattttacgtacatgttttcagaagcatgtttattgcattaagtgattgctgtactgtttatttcatgactattagagtgtaaattccttgaaggcagtatcatgccatctcttttgtatcctcctctgctttgtatatcacactctgaatataattcttgtcactgtggatttgggctccctttctatgtccaattcctcttcccttatttaggctcaggggagagagaaagcccagaaagaaagctactccagggtcctatggatatttcagagaagttattttgttcaacttgtgaccagaccttccagaaccaccaagaacagagggaacattataagcttgactggcatcggtttaacctaaagcaacgtctcaaggacaagcctctcctgtctgccctggactttgaaaagcagagctccacaggagatctttccagcatctcgggatcagaagactcagactcagccagtgaggaggacttgcagacactggatcgggagagggctacatttgagaagttgagccgacccccaggcttttaccctcatcgagttcttttccagaatgcccagggccagtttctttatgcctaccgctgtgtcctaggccctcatcaggatcccccagaagaggcagaactgctgctacagaacctgcaaagtagaggtcccagagactgcgtggtgctcatggctgcagctgggcactttgctggtgctatatttcaaggaagagaagtggtgacacacaaaacttttcaccgctatacggttcgggccaagcggggcacagcccaggggcttcgggatgcccgaggtgggccatcacactctgctggagccaacctgaggcgctacaatgaagccacactatataaggatgttcgtgacctgctggcagggccaagctgggctaaggcgctggaggaggctggtacaatactgttgcgtgctccccgctctggccggtctttgttctttggaggcaagggagcacccctgcaaaggggggatccccgactttgggatatccccctcgccacccgcagacccaccttccaagagctacagcgtgtgctccataagctgaccactttgcatgtctatgaagaagaccctcgggaagcagtcagactgcactcacctcagacacactggaaaacagtaagagaggagagaaagaagcctactgaggaagaaataagaaagatctgcagggatgaaaaggaagcgctggggcagaatgaggaatctcccaaacagggtttgattactatctggcaactgtcagatctgagtttctgtcctaaaaatgcactggcaaattccctactctcataactgacccatttccttatttaaacacacacccacagtgtctatcttagcaattactgagacatgtttagtgacctttccaaatctattatctcttttgttatggatgtttccccagagctaagaaaatctttgtgtggagcagatgcgtgggtgtgttgcatggatctcacatagtttatctttgattggatgctgtggtttgaggctgagggctgcttccatgctttcctctattgtgcggcaccctaaggctactcatacggagagtccagggacttgttcttgtctgggctgagagcctcatttctgcatgtgatataatggactcagctcttgatgtgctacttttatctgggt

SEQ ID NO: 2417 - DNA, 2368 bp, Homo sapiens
gatggctcccacatttttactgtcataaataggcttcagtggacacattaggcatagaagttgttctatttcttcatctgtaaaatggggattgtaatatttactttccagggtcatagggataagagagctaaaggatgtaaagtccggaactagtgctgtcttttagatcatggtaacatcagtttgcaaaagaaacgaataccagcttgtgtggtttccatgatgggaaaccatccagtccctgctggtgtgacggtaggaatgggcttgtccatcgttcccgggaactcagacaggtggacctgaccttttattccttgggggtttctcgtagtcttgggacatcagcccagtgccttggaaccttaactcatctgactcttagaaaaatgcccatggcaagatcatcattctgtatgacgatgatgaaaggctggccagtcaggcggccaccaccatgtgcgagcgtggatttgaaaacctcttcatgctttccggaggtgagcaaggtgatactctgcttgggacttcaaaggctgatcatccttcagtcccacctgcatccccttttctctcttggtgctcagaattcagtgttctggaaagagaaaaagccatgctggctgaaaggagtcaggagttatgtgaaacttcccttagcttcatcagcacatgtttttaattcctgatgttgcttcagggctctgtcacaaagccctaatgctgaagactcgagcaaaaggatttcttgtggaattctcagaatcccatgtaacaacagatattttctggtataatttgcttaatgatgaaatagttaagaaagatttcatgtccttgtgttggcctcaacttgatgaccagagattagaagacatgcaggcttctttccaggttttggcctggccttgccatattaatgcagctttttctgatgattttccaaacctaggtctaaaagtcttagctcagaaattcccggaaggactgattactggttccctgccagcatcttgccagcaggcccttcctcctgggtctgcccggaaacgatccagccccaaagggccacccctaccagctgagaataaatggagatttaccccagaagacttaaaaaagatagaatattatctggaagaggagcaagggcctgcagatcatcctagtaagatcttttgacctttaaagataatgtttggtttgcagctttgaatatcacctcatcatatgaaaaccttcatctcttatatttagattcttaaaatactagggaggtatgttacaggtgctggggaggggaggcagtggaggtgaccccagatagtggcaagaattacgcattgaagagagactttatcaaaacatagcgactttttttttttttgagacagagtcttgctctgtcacccaggctggaatgcaatgggatgatcttggctcactgcaacctccgtctccccggttcaagcgattctcccacatcagcctcccgagtaggtgggattacaggtgcccgccaccacaccaggctaatttttttgtattttaagtagagacagggtttcaccatgttggccaggctggtctcgaacttctggccacaagtgatccacccacctcagccttccaaagtgctaggattacaggcatgagccaccacgcccaggcaaaaatgtagagacttcatcaaaaagtatatctcaggtaaaattgaggagttaagcatcagaccttcagattccttcttggaaagttttcgattccttctgcagcttttgcttctccactctgagagcctctgtggtttgtcttcctaccttagtttcaccgtactgctttctcttttctttccccaaatcactcctcgtctgcatcctctctaccaaggaagtagtggaggacagactaggtttgttggggatgttggagaggaagggaaaaaaaacctatctgggtttcccttcatttctgtccccctccccaccttcaggctgatctcaaggatgaggagtaggccatcgttggcctaaagtagatactgcataggacttcattagcttaaaagtggttgtaggctaggacttcattagcttaaaactgtacttggcagattgtccctggaatcattcttgcagctctgttccttctttcttgctcccttcaggccgactgaaccaagctaactcctccggaagagagtccaaggtgcctggtgcccgaagcgctcagaatctgccaggtggcggccccgccagccactcaaacccccgctccctcagcagtggtcacctgcaaggcaaaccctggaagtaaagactttgtctcacctaggcaaataaatgttcttcctcttttcagaacc

SEQ ID NO: 2418 - DNA, 2393 bp, Homo sapiens
ttagatgttccagaagccctgactgggctggtcacttccttcacaggccccgcatttgcccacatggatgaccccagtgccagcctccttgaggtggcacagccacctgcccaccctgggctgccctctttcaggtacaactcagaatgctcagtcctggggtcaaaccaccttatccaggacgctgattcaggaatcttccctccttatctttccatccgtcactctcctgcctctggtgtctgatcccactgtctgcgcagagccgagaatgaagccagaacaaaggctgggctcagctccttttattcccctcgaacctggcggggcctgctggctcccttgcagctttctgccagaacagtcagcctcttccccatcctctgccagtgtggggtacaggccaggagctgggggacccacgccgcccccagccaggagtgtggctggccccagaccagcagctcaagagttgtgccatcccccagggagagatgacatgctggacgtggagaccgatgcctacatccactgcgtcagtgccttcgtcaagctggcgcagagcgagtaccagctgctggccgacatcatccccgagcaccaccagaagaagaccttcgactccctgatacaggatgccctggatgggctgatgcttgaaggggagaacatcgtgtctgctgcccggaaggccattgtgcgacacgacttctccacggtgctcaccgtcttccccatcctgcgacacctcaagcagaccaagcctgagtttgaccaggtgctccagggcacggctgccagcacaaagaacaagctgcctggcctcatcacatccatggagaccatcggtgccaaagcgctggaggacttcgcagacaacatcaaggtccctgctgtcctcccctttctccctccctcccggcccagcaccacagtgacctggccctgggggactctcagagcaggcctccaagagggtgcgttgtcccggggcagccagctgcgccactggcctgtcagcacccatgtgccttcctttccttcctggggcctccaagccctctgaagtgggaagggcctctcccccttggtccagcctggctcagcctttgtgcctgagaggtgtcctagcacccgtctgccaggaggcggcaccatgagcaggtgcactggggcatggggtgggctgggggctgcttcagggaatcagaggctgtttttccacagaatgacccggacaaggagtacaacatgccgaaggacggcaccgtacacgagctcaccagcaatgtgggtgctgcctgaggacaccagggagaggggaggaaggagggcccaggcccaggcccagggccaggcagagtactggtggaagggactcagcctggcccagagccgctcgcacctttgtgagcagtcctgggtggcaggatggacagtgacatgtttagtgtctctagcagacagggcctttcctggcaggctagagtgaaaatgaagtttccagccgcgctcttcactgggcggatcccagccctgggctggccctgggcactcagaggggtcgctgtgggaggccgtcggccgggcctgccacttgcccttctgcaccgttttcttcccacccaggccatcctcttcctgcagcagcttttggacttccaggagacggcaggcgccatgctggccccccaagagaccagctcttcggccaccagctacagctctgagttcagcaagcggctgctaagcacctatatctgtaaagtgctgggcaacctgcagttgaacttgctgagcaagtccaaggtgtacgaggacccagctctgagcgccatcttcctgcacaacaactacaattacatcctcaagtccctggagaagtctgaactgatccagctggtggcagtgacacagaagactgctgagcgctcctaccgggagcacattgagcagcagatccagacctaccagcgcagctggttaaaggtgactgattacatcgcagagaagaatctacctgtgttccagccgggagtcaagctccgggacaaggagcggcagattatcaaggagcgttttaagggcttcaatgatggcctcgaagaactgtgcaaaatccagaaggcctgggctattccagacacagagcagagggacaggattcgccaggcccagaagaccattgtcaaggagacctacggggcctttctacagaagtttggcagcgtgcccttcaccaagaacccggagaagtacatcaagtacggggtggagcaggtgggcgacatgatcgatcgccttttcgacacctctgcctgagcctgctgctagccctgcctggttccaccagactggcgtgtcattggacagataaaccagtgttagcttgc

SEQ ID NO: 2419 - DNA, 3155 bp, Homo sapiens
gtgtttggagctggagacggcctgggtgctggcgaagcggaggccggaggtgagtggttcccccgccctacctccgaagcggccgcagaaaagcggggagagaggggtgcccttgggccgtagcggggcccgaatgcacttctgcggcgcggaggcgctcccgccaggcttcgccgcagcgcggacctcttcccgttgctcttcctcccgccacacgggtctgttcgctccgggggcgaggaagatgacctctgcctagtccgggcaaccccagctcttcttccactctcctgtgtagcctctgaagcgcagttaccggccccacccccagttccctgcgttttcctcgccccttgtctctctcggcatggtctcggcacagcaaggtgtgttcacctgtgcgcgccgtccaggatcagatgctgacgggctacaccgcggaaggcggcgaggcctcgggttcgcccttcgtttctccttgccctgcgcgcccacctccggcaggccacccttgacttcttgcccccttccactttgcacctggcagtgggttaacggcacggcgtgtgcagcttccgggtttagcagagccgcggaccctgcctgggctccgaccacggggcgtgtgggcatgaacgtgttcagaaacgtttccttccccctgccctttcaaagctacttagagaggggggacgtgaaccactggatgggaaatcaggaactgctttattaagcagtttgccctttggagtggattttagagttatcccccgaatgtgctatggttttgtggcccctccttcatatctttgcttggtttttctttctggttatgctctgcaagtagtagagccttgtaacatttatttagtacattcaaaaagtaatagacaaggcccctttagcggagcactcgatgttgcaattcagccccgctcctcactgtaaattgacatttcctcttcaattccagttaatacacgaggaactcatgcaaaggaggggactttcggaaatccaaacttagagtgccttgtatttagaatccggaaggaaaaggaaatgaaatgtgaagaaactcatgcaccaaactcgaactgggtatatgtgatgttacctaggtattatttttgaagaatttctgactgacaataaaatatagagtaggatactttcatgtaaggcacgaaacttaaatttaatgcaaggttgtctgatccttgttgagattattaaatctaaggtgtatgaagagttctgtgttctcacatcataggataggtgtaaaaaagaaagctgtgaatttatttactatcatcatctctcttaggaagaagggaagtgtggaaaaaaattgtcttcaggagaggaagaagcttgtagatataattgaacagcatcttgatttcttttttgccaagatgttactgttggctggttattttcttgtattgttcaatgaaaatcataaaattattattcagtgattacttaatggacaccagaataaccaaacccttttccattcttttttttgcaaaggctggtctcctttggcctggacgtcctgatctttcccatagtagaactgggctgggtgtctcttttttttttttgagacggcgtcttccactgctgtcgcttgggctggagtgcagtggcgcgatctcggctcactgcaacctctgcttcccaagttcaggcgattctcttgcctcagcctcctgagtagttgggattacaggcgcgtgccaccacgctcagctaatttttgtatttttagtagacagggggtttcaccatgttggccaggctggtcttgaactcctgacctcgtgatccgcccgactcggcctcctaaacttttgcaaagctgtatctctaggaattgaattggaagattactgaagcacagtagcattccctgacttcctgcaacgcagggaaatagttaaaaagaagatgccactggaagtaaaatttcaactcttttgtttttgaaacagtatagcttttcataatgtcaactaagcaataacttggctttttggtgtgttggctaccctactattggccataaaataggcactctggtacttcagttgatgaatgtttttgctaaagttggactgtaccgaatttcattcttattttgtacgctaattggtgtaaaataaggaagtaattgttggaatgcatactgtattcttaggttttattagtacatttggttgcttaaacttaagaataagagtaaacaacaactgaattataattgaactatctttctttttcgtttttttgagacagggtctctctctgtcacccaggctggagtgcactggtgcaatcacagctctctgcagccttgacttcctgggctatcccaccttacttagccttccaagtagctgggaccacaggcacacggcacgacaccaggctaatttttgtatttttggtagaaatggggtttctctgtgccgcctaggttgatctcgaactgctgagcttaagcagccctctcgctccagcctcccaaagtgctgggattacaggcgtgagacaccgcacccagccagtagatgcatttcaatccaatatatggcctttgtgttgaggcatggcaatacaaaggaaaaacacgttcaagtttttattcacaaagtacagagaatacatgaagttcctcactaagtgatcattatgccaaaatcaaaatttcaggtacttttagtgctattgagatgtattgatttattttctgtcaactactgtataattattttttttctgtctaccctcagtaagaagactgttagaatgccctcggtaacacagaggctgagagatcctgacataaatccttgtttgtcgatcctgttctaccttttaaatgatgcctctcttatatctgtaaggaatctgatgcttccaccagatgtctggatgaaaataactatgacagggaaaggtgttccacttacttcttgaggtacaaaaactgccggagattctggaattctatcgtgatgcagagaagaaagaacggagtgaagccatttatgcctacggcagcagaaagagatgaaatcttgagagcagtgggaaatatgccctattgaatgtttgcattaaaagtgtttatataactt

SEQ ID NO: 2420 - DNA, 2309 bp, Homo sapiens
tttttgatcctagcttagtttgggctggaggttcttaatcagccccaggaaagtctatgctgtcaccatgtaaacagtcaatgacaataccagcctggtaagtgctgccgtaggggtgaacacttgagctctgcaggttccatgtttcaacaggggctctgggaatgcttcctgcaggcactgattcctttaatgacctgaagggtgaaaaggagtgaaccagatgacagtgggggaggaagagggaagagatgagtgcagcagcaaagggaacagcatgtgtaaataaacaggcaggcagccagggccaggagaggcctcggggacccgtttgtgacctgccgagtatcagaatcaagggacagggctgtctggggggatgcagaggtgggatcttgccccagagaagatgagccccaaggcttgagccctgcacctggcttggcggcccagcctctgccctccctcccttgcctgacccttttgctgtctctttgcagagccagaagttcctgctgaggacatgaggacccgtctttttgcagtgccaggcagggtggccaaagaggactggactctggacctggagccccgtggtccagttcacattcaccccacaagagtttcaggaggcctcccacggtgcctgtgctgggtggcggtggtggtgccaagaggaatggaatgtcctgggctccttcaggagctctctacccaggggcaaggagagcccagagagaagcgccctggtctcttgagcttcctgatctgctcctgtcccccgctctcctccactcccttgcctttccctaggttgtcccctccctgggcttttgtgtgttttgggagatgtcacctaaccaggacattgatattcaatcccatcccccttcctcccaccctgccccactttgatttaatcctttggctgtgggctgaggcctcccagggaagctgggtggggtgggtgttgagaccccctcagaccagcacagagacctgtccttgtgcagtctgcaccctgcactccctcccttgcctgtagatgttctggatgacagtagaggaaatggacaaggtcagtttgaatatcccagaacacagtgctctgtctcctcccaccagtccagttagcttcccttctggaccaatagacgaggggagaccccatggatcctctggctgggaagccactgaccaggtggccagggggcagggtgggaagaggggttaaggtgcagtgatgatggcctgttttggagtgtgtctgagactgggattgcatttggggtttcccgtgtgcttgggatgctagagggtcacctgcaggaggcctggggccggcgagaaatctcctgtgatgccctgtgaaatggcttgtctcctcccccatcagggcccaccgaaagctcaggggagcacagaagcccatggaagcccagggagatgtccctggggcagacactaaggcaggtgttgaagacaagctgcttgtcaagaagcatttcccggcaagagaggggcaagtctggggctccaactgggtacagcctgggtgcagttataagcccctttggcttacttggtagaagatggctacttggatgtacctcacttaaagatgttttgtaccacactaggtctctgggcccttgtgcttcctgtgggtggggtgagggccaaaggctatggtttcctgcctccaggagaatggagagaaagggcttccaggcccctccaagcctggggaaggacgtggcatccaagcctgagccagagggaactgctgctgtcctcccttcatttctgtggaccttggaggctttggctttgtggcagggcctccccaggcagctctgggacctaggagtttgcttctgatagggtcagctttcccatttcccttcaatgcttgggaaccttctcccttagcttcacacttgccgtttcaagccctgctgggaccttgtggcttggctggaatccaggactgtattttcatggagaagaacctgcagattcttccatcctcagctggccatggcccacagctctgcatctgcatctgagcttctcaagactcctggagcatgaggggaatggggcggggccactgctctgtgctgacgggctccgtctcggagattcttgtcctgttttttttctgttgtttttttttggctggtgctggggacaagcctgtgcctgccaaagctcccaggccaagtttgggggctggtgtttggggttgggtttggggttcaggatgctgcagtctgtgcaataataaacccgcatctgctcacggg

SEQ ID NO: 2421 - DNA, 2131 bp, Homo sapiens
gaccctattgctcggtggcaacgcagccggcgactttaagctgaaggccctgctggtgtacccctcggagaacccgtgtttcctcaagggctccttcaagcccaacctgcccttggtgtggtgctcgcacaggaaagcctgggtacagcctgggtgacagagcgagactccgtctcaaaaaaaaaaaaaaaaaaaaaaaaaaagcctgggtaaccatgagcctcttccaggagtggttcctgcacttctgctctacagtggagggcgctgcacccagtacgaccttccctacaaggggctgcccatcctggacagcactcccggccaccctgggtgttgagacagagtctggctctgtcgcgcaggctggagtgcggtggcgcgatctcggctcactgcaacctccgcctcccgggttcacgccattctcctgcctcggcctcccaggtagctgggactacaggcgcccgccaccacgcccggctaatttttttgtatttttagtagagacggggtttcaccgtgttagccagaatggtctcggtctcctgaccccatgatccacccgccttggcgtcccaaagtgctgggattacaggcgtgagccatggtgcctggccctttaattcccccaatatttttttatctgcattaatttattatttcaagtgaacttccatctcaaatacatggttctcagacgcttccatgaactctcaagtgtgacttattacagcctggggctccttggagcacagtgtgccagtgacctagtggaaggccatgagaaagccaggttcactgttcactgtgcagcatctccctccatggtcttcctggagcctattcccactgcactgagcattccgtgtgtccagaggtagggttagcagggatagatggacttcctgcttattttctgttcacatttccactgaccttcaatcctgtagactgcaaagattgagccagctgagcccccaaagagactcagcagtgcagaatgtgggcctgagtgggaggactgcccagccgcccaccttccagctctgttcttcccgggccctggatgcttcttgccacgctgtcctctgaaatgacgctctgccccagcagacctgtggtaggtgagctagtgaggaagcacacctgggctcttcccaccaggcatcccagccctggtgtggggtatccgcatggttgcaggcatcccctggccaggcctgggtgctcattctccctctctcttcttgtctcctcccctctccctgctttctctgccctgtcctcctgctttttgctgttttcccccggactcctgccatgcccccagactttctttttcccacggatatgggctcattccaaggaaagggtggcatttggacacaaggccctagatcccacgatggaggactggggggtacctgatgcccctcagaaagaggcctgcagggacagcacatgggaaagccccatggctttgtgatccatctggggatgtgatccatttgggtaaggacttgggtttcagggcatgagttggcttccttgcaggatgcaggtccttaggtgggtggcctctgtctccagctgtagggccctgccaggaagcctctatatgagcctacctccctcctgcaggaccagagaggggttgttatgaacagcccaggggattggttgcactaagcttgtcttgaagcttttgctggggagtccaggtgcccatgtctctcacctgctccccatacacatctctgcacacctggctgaggcattcccagacctaacctcagataatgtgcatgtgatgaacactcccaagtggctaggcctcttgcacctgagcaggtggattctgccccagcactggggctttctctgggctgtccatcatgggtatatctctggattccaggattgctagttagcacctcacatttgagggtctgtgctattcagtctagaatcagagttggatgagaaatcaactttgaacaccacctttggggtggctgcattggctcacacctgtggtctcagcactttgggaggctgaggcgggaggatagcttgaggccaggagttcgagactaaccggagcaacatagtaaggccacatctgtac

SEQ ID NO: 2422 - DNA, 2637 bp, Homo sapiens
aatgcgattggagaccgcggaggcctacgtcggacccggaggccctgaatgccccatgcgcaccccacagctcgcgctcctgcaagtgttctttctggtgttccccgatggcgtccggcctcagccctcttcctccccatcaggggcagtgcccacgtctttggagctgcagcgagggacggatggcggaaccctccagtccccttcagaggcgactgcaactcgcccggccgtgcctggactccctacagtggtccctactctcgtgactccctcggcccctgggaataggactgtggacctcttcccaggtgtgggaaaacgttgtgggggtggaaacttacttctgagatctaaaattctgtgagcaaagttgagctgccacaaagcaggagtggggctgtcggaagaaggagggtgagcacctgggagagtttggggatcttcatcccactcactctgtgtcgtactttcatagtcttaccgatctgtgtctgtgacttgactcctggagcctgcgatataaattgctgctgcgacagggactgctatcttctccatccgaggacagttttctccttctgccttccaggcagcgtaaggtcttcaagctgggtttgtgtagacaactctgttatcttcaggagtaattccccgtttccttcaagagttttcatggattctaatggaatcaggcagttttgtgtccatgtgaacaactcaaacttaaactatttccagaagcttcaaaaggtcaatgcaaccaacttccaggccctggctgcagagtttggaggcgaatcattcacttcaacattccaaactcaatcaccaccatctttttacagggctggggaccccattcttacttacttccccaagtggtctgtaataagcttgctgagacaacctgcaggagttggagctgggggactctgtgctgaaagcaatcctgcaggtttcctagagagtaaaagtacaacttgcactcgttttttcaagaacctggctagtagctgtaccttggattcagccctcaatgctgcctcttactataacttcacagtcttaaaggttccaagaagcatgactgatccacagaatatggaggtcacctatgagatagagaccaatgggacttttggaatccagaaagtttctgtcagtttgggacaaaccaacctgactgttgagccaggcgcttccttacagcaacacttcatccttcgcttcagggcttttcaacagagcacagctgcttctctcaccagtcctagaagtgggaatcctggctatatagttgggaagccactcttggctctgactgatgatataagttactcaatgaccctcttacagagccagggtaatggaagttgctctgttaaaagacatgaagtgcagtttggagtgaatgcaatatctggatgcaagctcaggttgaagaaggcagactgcagccacttgcagcaggagatttatcagactcttcatggaaggcccagaccagagtatgttgccatctttggtaatgctgacccagcccagaaaggagggtggaccaggatcctcaacaggcactgcagcatttcagctataaactgtacttcctgctgtctcataccagtttccctggagatccaggtattgtgggcatatgtaggtctcctgtccaacccgcaagctcatgtatcaggagttcgattcctataccagtgccagtctatacaggattctcagcaagttacagaagtatctttgacaactcttgtgaactttgtggacattacccagaagccacagcctccaaggggccaacccaaaatggactggaaatggccattcgacttctttcccttcaaagtggcattcagcagaggagtattctctcaaaaatgctcagtctctcccatccttatcctgtgcctcttactacttggagttctcaacctagagactatgtgaagaaaagaaaataatcagatttcagttttccctatgagaaactctgaggcagccacttatcttggctaaatagaacctcacctgctcatgaccagagagcatttaggataatagatgacctaactgaaggaatccttgtatatgaaaggagttattttagaaaagcaataaaaatattttattcatcatagctctctgctttgggctctgcaggccaccagatacacatgaggcccctacttctcaagctgggaaggccaagagccttccttcagcctttctggttatgttacacctagctgaatgtttacaaggtctggatccatcagccctcaggcacagttgggccaagcagaaagagagaaacacttctgctgtcaccttgaatgaactcaggaatagcttccctctggactgtagaggagctaactgtttggaacagaaaactgctggctgttgattttgtctggttcctttgccaacatctgggcacaccctttgcccagacacgagtggggaaagcagttctttctcctcagtttccaaagtaaatggggaatcccagctttcttttctactagcaaatgaccctaccatttatttctgcctttttcttccgttcattgtgaggaaaaataaaactggttgagaaaaaaaaaaaaaaaaaaaaac

SEQ ID NO: 2423 - DNA, 2190 bp, Homo sapiens
gtcttatttcttaatatctgcaaccagctcagagccagggataagtcaagactccaccagcccatgtatggctgcccggctgcccccagccttgccctcagttcttccccgagggcatgtcctgttgagagccggtttcacctgtgcagtgtggcctgatggcccagcacccaggagctctgcgcaccctgccgccatgggccatccgtccccagacctcttcccacagggtcactgtggtccaccgtcctgccctcggggaatctcagcctccctctcacaggtgcacacatggggagcagccaaggatttctgcagaaaaattcactccagaggtcagcagctagaagcacaaatggagagtgagtgagcacgagcgcctcgtggactcagccctcccaggcccagaaccaagcgcccatggacacccctacacgggcagcaagggctggaaccggcagcctggtggacatccgccctgcagggctctccctcgcagagactgcagaagagggtgtgcagtgctcagcgcggaaggatgttctccctgcttttaaggagccgtgactattttgctcagcgtccctggcgtgcctttctctgtacaaaaaggagacttagaggcttccccatcccattaccacagctgggcggcttcttgcatgagggcaccttgctgaactaagtcaccccaagctaccctaggctccctgtgcactgagatgctgagtcctgaggtgccttccagcaccagtgaatgggactaaagtcttctgcagtgtcgcgaccgttctgaagtgagtattctgtggtcatttgttaccctctgtgaagcccaggaagcagggattcagggctgaccagggaccactttgttctctgcccatgcatggaaggtctgcacttgggccccaaagcctgagtaaagtttcaccgtgaacttcttccagcaggataaacagtagggttcagtactgagggtctccagtttaaaccctgattccactacaaaataaatgctagactgggccacatatttaagctgtgttttccttatgcttaaaatggcagtaagattccttccagaggccatgcagggagataatgcccacagaacgctcagagtggggcttggcagagacagggctagacaggggctgttatttagtgctggcatcttttattggtggcgatgttattttattttctatgattatgtaatttcctccttataatctcacccttgttgcttatcttaagagtgatgtttcaggagcaacagcatcaatgtagtgtttgatattctggacaatctaacacaagcaatttctaattcataatccactatttgtatttgttgattatttgtttataataaagaaagcaatgctttgtcagttttccacaatctgccaccaacctcagatatgctttcatgaagctcatcttcaattaaggcccgtgtgctttatttttgtgaaaaatggagatgtgaagacattctgtgctctgctaggctgtgtcctgagaaccccccttttaaaaaggttctcagtattgcaggtgtcacttttttccattataaatcacaaaatgtagtagccagttaacaagacacaggtgttgctcccctgaaagtgcctgcagaatggtgccgaggttctctcctcacccatagctcttggcatgatttattcctgctgcacgccttccgggaggtccaccaggctcacgtctgtgtctgtggaggtgtgtgtgaacatgtgcacgtgagggtacatccagtcttctaccagctaatacgtcagagaccacataatgttaggctggaagagaccctaaaggttatataaaccaattcccttattttagagctgagaaatttcaggtgcaaagaagggagaggctataacatggtggcactagaataagactgccgggtttgaatcctggtgcaactacttattacctgtgtgatcttgggaaagtgacttaacctttctgggtcacagtttggatacctataaacggcagatattaacagtctctatttgtgtggatattttaacaataaaattaaatcattcacgtaaagaacttaaaagactctcagataggttgtggtgagctatgattgtaccactgcaccccagcctcctgtagcctgggcaaaggagcaagattgtctct

SEQ ID NO: 2424 - DNA, 2230 bp, Homo sapiens
gctggagtccggggagtggcgttggctgctagagcgatgccgggccggagttgcgtcgccttagtcctcctggctgccgccgtcagctgtgccgtcgcgcagcacgcgccgccgtggacagaggactgcagaaaatcaacctatcctccttcaggaccaacgtacagagtgcagttccatggtacaccataaatcttgacttaccaccctacaaaagatggcatgaattgatgcttgacaaggcaccaatgctaaaggttatagtgaattctctgaagaatatgataaatacattcgtgccaagtggaaaagttatgcaggtggtggatgaaaaattgcctggcctacttggcaactttcctggcccttttgaagaggaaatgaagggtattgccgctgttactgatatacctttaggtcatctaatacatgggagaaacatggattttggagtatttcttgggtggaacataaataatgatacctgggtcataactgagcaactaaaacctttaacagtgaatttggatttccaaagaaacaacaaaactgtcttcaaggcttcaagctttgctggctatgtgggcatgttaacaggattcaaaccaggactgttcagtcttacactgaatgaacgtttcagtataaatggtggttatctgggtattctagaatggattctgggaaagaaagatgccatgtggatagggttcctcactagaacagttctggaaaatagcacaagttatgaagaagccaagaatttattgaccaagaccaagatattggccccagcctactttatcctgggaggcaaccagtctggggaaggttgtgtgattacacgagacagaaaggaatcattggatgtatatgaactcgatgctaagcagggtagatggtatgtggtacaaacaaattatgaccgttggaaacatcccttcttccttgatgatcgcagaacgcctgcaaagatgtgtctgaaccgcaccagccaagagaatatctcatttgaaaccatgtatgatgtcctgtcaacaaaacctgtcctcaacaagctgaccgtatacacaaccttgatagatgttaccaaaggtcaattcgaaacttacctgcgggactgccctgacccttgtataggttggtgagcacacgtctggcctacagaatgcggcctctgagacatgaagacaccatctccatgtgaccgaacactgcagctgtctgaccttccaaagactaagactcgcggcaggttctctttgagtcaatagcttgtcttcgtccatctgttgacaaatgacagatcttttttttttccccctatcagttgatttttcttatttacagataacttctttaggggaagtaaaacagtcatctagaattcactgagttttgtttcactttgacatttggggatctggtgggcagtcgaaccatggtgaactccacctccgtggaataaatggagattcagcgtgggtgttgaatccagcacgtctgtgtgagtaacgggacagtaaacactccacattcttcagtttttcacttctacctacatatttgtatgtttttctgtataacagccttttccttctggttctaactgctgttaaaattaatatatcattatctttgctgttattgacagcgatataattttattacatatgattagagggatgagacagacattcacctgtatatttcttttaatgggcacaaaatgggcccttgcctctaaatagcactttttggggttcaagaagtaatcagtatgcaaagcaatcttttatacaataattgaagtgttccctttttcataattactctacttcccagtaaccctaaggaagttgctaacttaaaaaactgcatcccacgttctgttaatttagtaaataaacaagtcaaagacttgtggaaaataggaagtgaacccatattttaaattctcataagtagcattcatgtaataaacaggtttttagtttgttcttcagattgatagggagttttaaagaaattttagtagttactaaaattatgttactgtatttttcagaaatccaactgcttatgaaaagtactaatagaacttgttaacctttctaaccttcacgattaactgtgaaatgtacgtcatttgtgcaagaccgtttgtccacttcattttgtataatcacagttgtgttcctgacactcaataaacagtcattggaaagag

SEQ ID NO: 2425 - DNA, 2280 bp, Homo sapiens
gtccatcggggagggcgaaggccctgctctcctcggttcccggctccaggcggcgagctgaggttgggagcctggctttcccctccgagagggttcaggtgcctctgccatagcttctgtcgcctgtgctgtgacccgcactggtcgtgggagtcacctgaaaggcaagaaatgatgtttcaggattcagtggcctttgaggatgtggctgtgaccttcacccaagaggagtgggctttgctggatccttcccagaaaaatctctgtagagatgtgatgcaagaaaccttcaggaacctggcctctatagggaaaaaatggaaaccccagaacatatatgtagagtacgaaaatctaaggagaaacctaagaattgtgggagagagactctttgaaagtaaagaaggtcatcagcatggagaaattttgacccaggttccagatgacatgctgaagaaaacaactactggagtaaaatcatgcgaaagcagtgtgtatggagaagtaggcagtgctcattcatctcttaataggcacatcagagatgacactggacacaaggcatatgagtatcaagaatatggacagaaaccatataaatgtaaatactgtaaaaaacctttcaactgtctctcctctgttcagacacatgaaagggctcatagtggaaggaaactctatgtttgtgaggaatgcggaaaaacatttatttcccattcaaaccttcaaagacacaggataatgcaccgtggagatggaccttataagtgtaaattttgtgggaaagccttgatgtttctcagtttgtatcttatccacaaacgaactcacactggagagaaaccatatcaatgtaaacagtgtggtaaagcctttagtcattctagtagccttcgaatacatgaaagaactcacactggggagaagccttataaatgtaatgaatgtgggaaagcattccatagttccacatgccttcatgctcataaaagaactcacactggggagaagccatatgaatgtaaacagtgtgggaaagccttcagctcttcccattcctttcaaatacatgaaagaactcacacgggggagaagccatatgaatgtaaggaatgtggaaaagcattcaagtgtcccagttctgttcgcagacatgaaagaacccactctaggaaaaaaccctatgaatgtaaacattgtgggaaagtattatcttatcttaccagctttcaaaaccacttgggaatgcacactggagagatatctcataaatgtaagatatgtgggaaagccttttattctcccagttcacttcaaacacatgaaaaaactcacactggagagaaaccctataaatgcaaccaatgtggtaaagcctttaattcttccagttccttccgatatcatgaaagaactcacactggagagaaaccttacgagtgtaagcaatgtgggaaagccttcagatctgcctcactccttcaaacacatggtaggactcacacgggagagaaaccctatgcatgtaaggaatgtggaaaaccatttagtaatttctctttctttcaaatacatgaaaggatgcacagagaagagaagccgtatgaatgtaagggttatgggaaaacattcagtttgcccagtttatttcatagacatgaaaggactcacactggaggaaaaacctatgaatgcaagcagtgtggcagatccttcaactgttcgagctcctttcgatatcatggaaggactcacactggagagaaaccctatgaatgcaagcaatgtggaaaagccttcagatctgcctcacagcttcaaattcatggaaggactcacactggagagaaaccttatgaatgtaagcagtgtgggaaagcctttggatctgcctcacaccttcaaatgcatggaaggactcacactggagagaaaccctatgaatgtaagcagtgtgggaagtcttttggatgtgcctcgcgacttcaaatgcatggaaggactcacactggagagaaaccgtataaatgtaagcaatgtgggaaagcttttggatgtccctcaaaccttcgaaggcatggaaggactcacactggagagaaaccctataaatgtaaccaatgtggtaaagtctttagatgttcttcacaacttcaagtgcatggaagggctcactgcatagacaccccataaccccaggctttaggaggctgaggtggggggactgcttaagcccaggagttcaagaccagcctgggcaacatagtgagactctgttat

SEQ ID NO: 2426 - DNA, 2181 bp, Homo sapiens
tggatgacccgacagttcacccctgtgaaccagctaatcagtcctctgattatgacagcacagaaacagatgaatctaaggaggaagctaaagatgatggtgccaaagaatcaatgactgttaaaactgcacctcggtctccagatgcccgggcaagttatggccattcccaaactgattctgtccctggtccagctgtggcagccagcaaagaaaacctccctgtgctcaataccagaataatctgcccaggtttaagagcaggactggctgcctcaattgctgggagttcgattatcaacaaaatgttactggcaaacattgatccttttggtgccacgccgtttattgaccctgatctagattccgtagatggatattcagaaaaatgtgtcatgaacaattactttgggattggattagatgcaaaaatttcattagaatttaataataaaagagaggagcaccctgaaaaatgcaggagccgaactaaaaacttgatgtggtatggagtccttggaacccgggagttattacagagatcgtacaagaatttagaacaaagggttcaacttgagtgtgatgggcagtatattcctcttcccagcttgcaaggcatagccgtgttgaacattcccagctatgctggaggcactaacttttggggtggaactaaagaggatgatatatttgctgcaccatcctttgatgacaagatcctggaagttgtagcaatatttgatagcatgcaaatggcagtttcaagggtcattaaactgcagcatcatcgaatagcccagtgccgtacagtgaaaatcactatatttggtgacgaaggagtcccagtgcaagtggatggtgaagcgtgggttcagcctccagggattatcaaaattgtgcacaaaaacagagcacaaatgctaacaagggacagagcctttgagagcactctgaaatcttgggaagataagcagaagtgtgattctggtaaaccagttctccgaacccatttgtacatccatcacgccattgacttggcaacagaagaggtgtcgcagatgcagctatgctcccaggctgcagaggagctcattactaggatatgtgacgcagccacaattcactgtcttttggagcaagaactggcccatgctgtgaatgcctgctcccatgccctgaataaagccaacccaaggtgcccggagagtcttacaagagacactgccactgaaatagccatcaatgtgaaggcgctgtataatgaaacagaatctttgctagttggcagggttcctttgcagctggaatcgccacatgaagagcgagtatccaatgccttacactctgtggaggtggaattacagaaactgacagagattccttggctttattatatcttacacccaaatgaagatgaggaacctcctatggattgcaccaaaaggaacaacagaagcaccgtatttcgaatagtgccaaagtttaaaaaggaaaaggttcagaagcagaagacaagttcacagcctggatctggggataccgaaagtgggtcatgtgaagcgaattctccagggaattaaagagcttggaaggagcactccacagtcggaggtgtaatcatattggtgctattccttggaagagaagttattgccacttaatacaaagtccttggaagcaagtggctgttcttgtagttttctgcatagataagtaagcaccactgaagcacctctgtggcttgatattttgctgtgggtgaaattttgatttgaggtattagaaaatatttttgtgccgaacaatacattccacaaagccattttctttttgtgcaaacctgacatgttcaaatatattcacaatggtaataaggtaggaggaatctgagacgattgcattgtctaaacagtggaattgcaaaatgtttactttccatagatctggtctgatggaatgttcctactgtgcaactgcataacaatatgtggttaaaacttcctaggtttcattacgggggggcattggccattttcttaaaatcataggttaggagactaaaatataaattaagttgtgatttgaatgtagattggtatcacctccaactcctagtgcttagtggtcaaatatgttgaaaacctttccaatactatgaatgaatgcaaatcttaatgcacg

SEQ ID NO: 2427 - DNA, 2309 bp, Homo sapiens; identical to SEQ ID NO: 2420

SEQ ID NO: 2428 - DNA, 2159 bp, Homo sapiens
cttggaagccagcccgggcccagacccagactttgctgcaccatggatgcacttcttgctgcctgccccatccttgccccatccttgcccactcgcctcctccctgcagtggatgggggtgagggaccaggcccgggatggcatgggcctacccctcaaggtatcctccgggctcaggcccagtgtcactgtccctcccctcccagacagggatgtccatcgcttggtgttccctgccgtggggccgcagcacgccggtgtctacaagagcgtcattgccaacaagctgggcaaagctgcctgctatgcccacctgtatgtcacaggtgaggcaggcaccctcgtggtcagctgcacgcacagcctggcctctggcactacgtgggggctcagggaaaggggcctccacccagctcccttcccctccatcccctggggaccctcttgccttgcccctgcccctgcggctgagcccccaggccctagcctcctgccctgaggctcggtgatcctgtggggctgttgggcccttggacccagcagacattcgaactgcggctttcagatgtggtcccaggccctccagatggcgccccgcaggtggtggctgtgacggggaggatggtcacactcacatggaacccccccaggagtctggacatggccatcgacccggactccctgacgtacacagtgcagcaccaggtgctgggctcggaccagtggacggcactggtcacaggcctgcgggagccagggtgggcagccacagggctgcgtaagggggtccagcacatcttccgggtcctcagcaccactgtcaagagcagcagcaagccctcacccccttctgagcctgtgcagctgctggagcacggtgagcctgggtgctcctgtcgggtgggggtgggagctgctgggatggggaatgggggccctgtggtggaggctcaagggatggcctggacatggtaactggcaggagcagcctagccgggcgggaccttggcccatctgtacacttccttctccctcctgaaagcagcagggcacggtggctgaagctcaggctttgggatcgggcctgctggggtccaaccccacaacctcagctttgctgctctctggctgtgttcccctgacaaatcgctaaacctctctgagcttcagctttcccatctgtaaaaacggaactcaagtgttgatgaggggtgttagaggagtggtgggtgctgaggacctgatgtcaagcccagcacagagcctgcgctctcctcctcccaggcccaaccctggaggaggcccctgccatgctggacaaaccagacatcgtgtatgtggtggagggacagcctgccagcgtcaccgtcacattcaaccatgtggaggcccaggtcgtctggaggaggtgggcccctttcccacatgtggcagcccaggtctggcccagcctggccggaatgccctggggcaagatctgggtgacctccctgtcatgtgtcccctagctgccgaggggccctcctagaggcacgggccggtgtgtacgagctgagccagccagatgatgaccagtactgtcttcggatctgccgggtgagccgccgggacatgggggccctcacctgcaccgcccgaaaccgtcacggcacacagacctgctcggtcacattggagctggcaggtgggtgacagcgggccttcttcctagcctccctccaaggcccaaagctctctactcacacccccaggtacacaacctgcctgacactgctgcagatccaaacccatgtcctctggtcaggcctgtccatgtcatggctatacaaataccatattagtaataatgacaacaatcatactaacaagatttattggccagacgcggtggctcacacctgtaatctcagcactttgggaggccgacacaggtggattacctgaggtcaggagttcgtgaccggcctcgccaacatggtgaagccccatctctgctaaaaatacaaaaattagctgggtgtggcggcaggtgcctgtagtcccagctacttgggaggctgaggcaggagaatcacttgaacctgggaggcagaggttgcagtgagccgagattgctccattgcacgctagcctgggcaacaagagcaaaactctgtctc

SEQ ID NO: 2429 - DNA, 1916 bp, Homo sapiens
ctcaagctgctgcacctggagaagccaaatgaacctgtccctgctgtctcagagggtggacagaaaagcgagacgcccctcagtccaccctgtgccgactctgctacctcagaggcagcaggacaaaggcccgtgcatcccgcagacaggctggaagacagcaataagctcaagcgttccttctctctggatatcaaatcagtttcatattcagccagcatggcagcatccttacatggcttctcctcatcagaagatgctttggaatactacaaaccttccactactctggatgggaccaacaagctatgccagttctcccctgttcaggaactatcggagcagactcccgaaaccagtcctgataaggaggaagccagcatccccaagaagctgcagaccgccaggccttcagacagccagagcaagcgattgcattcggtcagaaccagcagcagtggcaccgcccagaggtcccttttatctccactgcatcgaagtgggagcgtggaggacaattaccacaccagcttccttttcggcctttccatcagccagcagcacctcacgaagtctgctggcctgggccttaagggctggcactcggatatcttggccccccagacctctaccccttccctgaccagcagctggtattttgccacagagtcctcacacttctactctgcctcagccatctacggaggcagtgccagttactctgcctacagctgcagccagctgcccacttgcggagaccaagtctattctgtgcgcaggcggcagaagccaagtgacagagctgactcgcggcggagctggcatgaagagagcccctttgaaaagcagtttaaacgcagaagctgccaaatggaatttggagagagcatcatgtcagagaacaggtcacgggaagagctggggaaagtgggcagtcagtctagcttttcgggcagcatggaaatcattgaggtctcctgagaagaaagacacttgtgacttctatagacaatttttttttcttgttcacaaaaaaattccctgtaaatctgaaatatatatatgtacatacatatatatttttggaaaatggagctatggtgtaaaagcaacaggtggatcaacccagttgttactctcttaacatctgcatttgagagatcagctaatacttctctcaacaaaaatggaagggcagatgctagaatcccccctagacggaggaaaaccattttattcagtgaattacacatcctcttgttcttaaaaaagcaagtgtctttggtgttggaggacaaaatcccctaccattttcacgttgtgctactaagagatctcaaatattagtctttgtccggacccttccatagtacaccttagcgctgagactgagccagcttgggggtcaggtaggtagaccctgttagggacagagcctagtggtaaatccaagagaaatgatcctatccaaagctgattcacaaacccacgctcacctgacagccgagggacacgagcatcactctgctggacggaccattaggggccttgccaaggtctaccttagagcaaacccagtacctcagacaggaaagtcggggctttgaccactaccatatctggtagcccattttctaggcattgtgaataggtaggtagctagtcacacttttcagaccaattcaaactgtctatgcacaaaattcccgtgggcctagatggagataattttttttcttctcagctttatgaagagaagggaaactgtctaggattcagctgaaccaccaggaacctggcaacatcacgatttaagctaaggttgggaggctaacgagtctacctccctctttgtaaatcaaagaattgtttaaaatgggattgtcaatcctttaaataaagatgaacttggtttc

SEQ ID NO: 2430 - DNA, 2575 bp, Homo sapiens
atacgagaattagcgactcccagccgccgcccgggcccgcgcgctcctccgccgcgctccgctcgtctcctctcgaccccacaccgccggtcgacatgatccgctgcggcctggcctgcgagcgctgccgctggttcctgaccctgctcctactcagcgccatcgccttcgacatcatcgcgctggccggccgcggctggctgtagtcgagcgaccgcgtccagacgtcctcgctgtggtggagatgtttccttccacaggggcggcggcggcggcagcgggtcctaagaggacggctgccacagcctcatggagtacgcgtggggtcgagcagcgctgccatgcttttctggggcgtcagcatcctggtgatctctttcatcctctccttcttcgtcctgtgtgtaccccagatacttgtcttcctaagagtgattggaggtctccttgccttggctgctgtgttccagatcatctccctggtaatttaccccgtgaagtacactcaaccttcaaccttcatgccaagccccgctgtcacttccatctataactgggcctacggctttgggtgggcagccatgattatcctcattggctgtgctttcttctgctgctgcctccccagctgcgaagatgaccccctgggcaataccaagcccaggtacttctacacatccgcctaacttgggaatgagtgtgggagaaaatcgccactgccaagatggactccagaagaagaaactgtttctctaggctacttcgaacttattttttggcagtgttcatattctcaaactagtcaaaaatgctaaaataatttgggagaaaatatttttaaagtagtgttatagtttcatgttcattttttattatgttttgtgaagttgtgtcttttcactaattacctatactatgccaatatttccttatatctacccataacatttatgctatgtttgtaagagaatatgaacatgaaacttaacactttataaggtaaaaatgagatggtttccaagatttaataattggatcaagttcttgttatttccaaatagaatggacttggtctgttaagggctaaggagaagaggaaggtaatggtaaaaattgtcaatgactggccgggtgtggtggctcacgcttgtagtctcagcactttgggaggccgaggcaggccaatcacctgaggtcacaagttcgggaccagcctggcagacatggtgaagcgccgtctctactgaaaatacaaaaattggccgggcttggtggcgcatgcctgtggtcccagctactggggaggctgaggcgggagaatcgcttgggccagagaggtggaggttgcagtggaccgagattgtgccattgcgctccagcctggtcaacagagcgagactctgtctcaaaacaaacaaaaattgtcaatgaccaaacattctaaaagaaatgccaaaaaaaaagctttttttttcaagccttcaaactatttaaggaagcaaaatagtttcctaaatgcatattgtttgtgagaatttctcattaatatcctgaataattcttttttttttttgagacggagtctcactctgtctcccaggctggagtgcgatggcgtgatctcggctcactgcaagctctgcctctcgggttcacgctatcctcccgcctcagcctcccgagtagctgggactgcgggcgtccaccaccacgcccggctaattttttgtatttttagtagagacggggttttaccgtgttggccatgatggtctcgatctcctgacctcgtgatccgcccacctcggcctcccaaagtgccgggattacaggcgtgagccaccgcgcccagccctgaataattcattcttgctaagcttcatgttgactctatatatcatctaagaaagtattgttttgtggtccaaacctgttgccgtggttagtaaggctttcttaggtgtgaaatatttagatgaaattttctcttttaaagttctgtatagggttagggtgttggaaaatgctatattaataaatctgtagtgttttgtgtttataggttcagaaccagagtaactggattgaaagatggactgatagattagatatatcagtctaatttatcatgactgatagatctggttaagttgtgtactaaaggattaggagagcccttcctgtcacaaaagtgccactaaaacagcctaaggagaaaaatggcttgcttttctaaacttcagatgtatctgggctctaatcatatagacaggcttctgatagattgcaactgtaagtagaaacctacatatagttaaaatcctggtctttcttggtaaacagatttaaaatgtctgatgtaaaacatgccacaggagaattcagggatttgagtttccctgaatagcatatatatgatgcatcaaatgggttattactattttttaccatttctacttacataatgaaaaacaattcattttaaatatcacattattattttgtaagtcatggaaaagggcaattgaagttttcattatgaagttttcccaataaaccaggaattctaaacttg

SEQ ID NO: 2431 - DNA, 2111 bp, Homo sapiens
acacacagccattgggggttgctcggatccgggactgccgcagggggtgccacagcagtgcctggcagcgtgggctgggaccttgtcactaaagcagagaagccacttcttctgggcccacgaggcagctgtcccatgctctgctgagcacggtggtgccatgcctctgcaactcctcctgttgctgatcctactgggccctggcaacagcttgcagctgtgggaccggagacaggccaccgaatatgagtacctagagtatgatttcctgccagaaacggagcctccagaaatgctgaggaacagcactgacaccactcctctgactgggcctggaacccctgagtctaccactgtggagcctgctgcaaggcgttctactggcctggatgcaggaggggcagtcacagagctgaccacggagctggccaacatggggaacctgtccacggattcagcagctatggagatacagaccactcaaccagcagccacggaggcacagaccactccactggcagccacagaggcacagacaactcgactgacggccacggaggcacagaccactccactggcagccacagaggcacagaccactccaccagcagccacggaagcacagaccactcaacccacaggcctggaggcacagaccactgcaccagcagccatggaggcacagaccactgcaccagcagccatggaagcacagaccactccaccagcagccacggaggcacagaccactcaaaccacagccatggaggcacagaccactgcaccagaagccacggaggcacagaccactcaacccacagccacggaggcacagaccactccactggcagccatggaggccctgtccacagaacccagtgccacagaggccctgtccatggaacctactaccaaaagaggtctgttcatacccttttctgtgtcctctgttactcacaagggcattcccatggcagccagcaatttgtccgtcaactacccagtgggggccccagaccacatctctgtgaagcagtgcctgctggccatcctaatcttggcgctggtggccactatcttcttcgtgtgcactgtggtgctggcggtccgcctctcccgcaagggccacatgtaccccgtgcgtaattactcccccaccgagatggtctgcatctcatccctgttgcctgatgggggtgaggggccctctgccacagccaatgggggcctgtccaaggccaagagcccgggcctgacgccagaggccagggaggaccgtgagggggatgacctcaccctgcacagcttcctcccttagctcactctgccatctgttttggcaagaccccacctccacgggctctcctgggccacccctgagtgcccagaccccattccacagctctgggcttcctcggagacccctggggatggggatcttcagggaaggaactctggccacccaaacaggacaagagcagcctggggccaagcagacgggcaagtggagccacctctttcctccctccgcggatgaagcccagccacatttcagccgaggtccaaggcaggaggccatttacttgagacagattctctcctttttcctgtcccccatcttctctgggtccctctaacatctcccatggctctccccgcttctcctggtcactggagtctcctccccatgtacccaaggaagatggagctcccccatcccacacgcactgcactgccgttgtcttttggttgccatggtcaccaaacaggaagtggacattctaagggaggagtactgaagagtgacggacttctgaggctgtttcctgctgctcctctgacttggggcagcttgggtcttcttgggcacctctctgggaaaacccagggtgaggttcagcctgtgagggctgggatgggtttcgtgggcccaagggcagacctttctttgggactgtgtggaccaaggagcttccatctagtgacaagtgaccccagctatcgcctcttgccttcccctgtggccactttccagggtggactctgtcttgttcactgcagtatcccaactgcaggtccagtgcaggcaataaatatgtgatggacaaacg

SEQ ID NO: 2432 - DNA, 2094 bp, Homo sapiens
ctcttccagcaggagagggctctactctgagctcctattttccaaggctccgggccgcgctcggcgctggcctgctgccccggcgggtccgccggccggaggcgggagtcacaggaagagccctccacaaaaggaggcctcggcggatcaggacagctgcaggtgggtgtgcagactggtgagctgccagcaggggcccagacgcgccaggcctggagatggctggaaactgctcctgggaggcccatcccggcaacaggaacaagatgtgccctgaccatcgagcagatcgcgatgctgccgcctccggccgtcatgaactacatcttcctgctcctctgcctgtgtggcctggtgggcaacgggctggtcctctggtttttcggcttctccatcaagaggaaccccttctccatctacttcctgcacctggccagcgccgatgtgggctacctcttcagcaaggcggtgttctccatcctgaacacggggggcttcctgggcacgtttgccgactacatccgcagcgtgtgccgggtcctggggctctgcatgttccttaccggcgtgagcctcctgccggccgtcagcgccgagcgctgcgcctcggtcatcttccccgcctggtactggcgccggcggcccaagcgcctgtcggccgtggtgtgcgccctgctgtgggtcctgtccctcctggtcacctgcctgcacaactacttctgcgtgttcctgggccgcggggcccccggcgcggcctgcaggcacatggacatcttcctgggcatcctcctgttcctgctctgctgcccgctcatggtgctgccctgcctggccctcatcctgcacgtggagtgccgggcccgacggcgccagcgctctgccaagctcaaccacgtcatcctggccatggtctccgtcttcctggtgtcctccatctacttagggatcgactggttcctcttctgggtcttccagatcccggcccccttccccgagtacgtcactgacctgtgcatctgcatcaacagcagcgccaagcccatcgtctacttcctggccgggagggacaagtcgcagcggctgtgggagccgctcagggtggtcttccagcgggccctgcgggacggcgctgagctgggggaggccgggggcagcacgcccaacacagtcaccatggagatgcagtgtcccccggggaacgcctcctgagactccagcacctggaggaggcaggggcaggaagcggcctccaagacccttcgccttgggacaggaatgggcacctgcttctgagtccatacaggagaagaaagatctgtttcctctcctcgggcctccttctccctgggctggggactccaggggtggctgggagactgggcagccaccagcaaacagaccctgtggcccctgcccggctcccccacccattctgctcccctagagacctcttgtacagaagttgcccccaggtggtggggcccctccttgccctaggctggttggtaaaagagaggaggtcaacacccagcctagccacctctgcctcttgggtcagccctccttgactgtgtcccagccagcaccaggccagcagcctcatccctgccattcagggctgttccagagattcgatcctcttaaggcattatcagtgagcaaatgtgaaggaaatggtgtctggaagaaagttctggttcacatgccttgtagctaagtctttctgcaaacaacctcccttccccccgtcgagtcatttggtgactttgatggggggatttctggttatgtcaaggctctggagacaggaagggcctttggccgccttgggtagttgacctgccttttctgactccgggacgagccagtcctaggctgcctccgggagcacttgaggtatcccgcaggccatgaggacccactgggcagctcctggacagcctcttggctccagcccccacccgaaagtggacactggctccgccctggccacctggggactggcactgtggtgcacagtggcccaatgtggccaacggaagttttataaaagacaaaatgtatatcaataaacattttataacttgcagccag

SEQ ID NO: 2433 - DNA, 2271 bp, Homo sapiens
agataaatcggcgggccgggccggcgggtcggtgagcgcggcccgggccggacatggcggcgctctacgcctgcaccaagtgccaccagcgcttccccttcgaggcgctgtctcaggggcagcagctgtgcaaggaatgtcggattgcacaccctgttgtgaagtgcacctactgcaggactgagtaccagcaggagagtaaaaccaatacaatatgcaagaaatgtgctcagaacgtgcagttgtatggaacgcccaaaccttgtcagtattgcaacataattgcagcatttattgggaataaatgccagcgctgcacaaattcagaaaagaagtatggaccaccctattcttgtgaacagtgcaagcagcagtgtgcatttgacaggaaagatgatagaaagaaggtagatgggaaattgctgtgctggctgtgcacactttcatacaaacgggtccttcagaagaccaaagagcagaggaaacacctgagtagctcttctcgtgctggccaccaggagaaggagcagtatagtcgcctgagtggtggtggccattataacagcttctccccagacctggctctggactcaccaggcactgaccactttgtcatcattgcccaactgaaggaagaagtggctaccctgaagaagatgttgcatcaaaaggatcaaatgattttagagaaagagaagaagattacagagttgaaggctgattttcagtaccaggaatcgcagatgagagccaaaatgaaccagatggagaaaacccacaaagaagtcacagaacaactgcaggccaaaaaccgagagctcctgaagcaggcagctgctttgtccaagagcaagaagtcagagaagtcaggagctataacctctccatgacagacctcaaggaggctccctagcaacagcaaatggagttgtccagggttagggttggagacctggctgttctgtgggaattgcaagctttcttaagaaatctctattttattacagttatccttctttgtgcgattgcagtgggctgaatggaaacacctggtttgtgctgtgttagactgcatgcttgagtgtttgggatttcaagctcgctctctttctctcactattaggacttttctttttcttcttcctcttctctctattttggttctattctttttttttcttttttcttttttttttttttttttttttttgtggtggtcactgctcagtgtaatgtgcagaatgatttgttttttgtttttttttttttttggtccttcattgcatcctgccatacccatgagcaaacagtttggcattaattatatatcactgccaccctctgaactttgaaaactgccatcttcagacttggtataatggaagaggctttctctctccaataaaccttttgcttcagggtatactcttcggtttttttccagatgtattatgtatgaactttgtactatgtatagccagagttttatttattttttaaaaaagaaactttttcttgataaaggaataatggtggtctagctagttcttgtaaaagtgatgcctcttgaaaaaaaacagtcctattcactagcttttagtaaaagaatcagatcttttctttcttgttaccttggagtcttaaaaactgattgctaaggtgaaacaattcaatgcataagtatggagctaagtgccttttggaggatttcttggaagagcatttatggagatacttaagggaggtagcaaagatttgaaccgtctgtctttctaagtaagggcagaaagcaaggttgtccaggttgtactggacacttctctccccacccctttcctgattgttttatgtgattgattttaaattctcacactgccacttctttaaaaaataaaatcctttatttgcttatatcagttgtcatactgggctgctgtcagagaatgtttttttacatgaatgaacagattaaaaatggaataatatggtcgggtgcggtggctcacgcctgtaataccagcaatttgggaggccaaggcgggtggatcatttgaggttaggagtttgagaccatcctggccaacatggtaaaaccccatctgtactaaaaaaatacaaaaattagccgggcctggtggcatgcacctgtaatcccagctacccaggaggctgaggcaggagaactgctcgaatcccgggaggcagaggttgcaatgagctgaaatcgcaacactgcactgcagcctgggcaatggagtgagactccgtctc

SEQ ID NO: 2434 - DNA, 2522 bp, Homo sapiens
gcaacatccaacactgcttggagctctctgctcccagcctccatgctctgctcttggtaattgccatcggccatttcacaagggaggatgaggaaacagccaagggcatccaacaagtgtttggagctgaagccaggaggcacatcattattgtcttcactcggaaggatgatttgggggatgacttgctgcaagatttcattgaaaaaaacaaacctctcaagcagttggttcaagactatgagggccgatactgcattttcaacaacaagaccaatagtaaggatgagcagatcacccaggtgttggagctccttcgcaaggttgagtctttggtgaatacgaacggaggaccctatcatgtgaacttcaaaactgaaggcagcaggtttcaagattgtgtgaatgaagctgcatctcaagagggagacaagccacagggcccaagggaaaggcagctgcagtccacaggacccgagcagaatccggggacatcagaactgacagtcctccttgtggggaaacgcggtgctggaaaaagtgcagcaggaaacagcattctggggaggcaggcctttcagaccggatttagtgagcagtcagtaacccagagcttcttgtctgagagcagaagctggagaaaaaaagaaagtttcgatcattgatgctccggacatctcatctttaaagaacattgactcagaagttagaaaacacatctgtacaggcccccatgccttcctgctggtgacaccactgggcttttacactaagaatgatgaggcagtgctgagcaccatccaaaacaattttggagaaaaattctttgagtacatgatcatacttcttaccaggaaagaagatttaggggatcaggatctagatacgttcttaagaaacagcaataaagctctctatggtctcatccagaagtgtaaaaacagatatagtgccttcaactaccgggcaacaggagaagaagagcaaaggcaggcggacgagctcctggaaaaaattgagagcatggtgcatcagaatgggaacaagcattgcgttttcagagaaaaagaaaccctgaacattgtccttgtggggagaagcgggactgggaagagtgcgaccgggaactctatcctggggagcctcgtcttcacctctcggctccgggcccagccagtcaccaagaccagccagagtggcaggaggacatgggacggacaggaggtggtggttgtggacactccttccttcaaccagatgctggatgtcgaaaaggacccatcccggttagaagaggaggtcaagcgctgtttgtcctgctgtgaaaaaggggacacattttttgtcctggtgttccagctgggacgattcactgaagaggacaaaacagctgtggcgaaactggaggccatctttggagcagactttacgaaatacgcgattatgctgttcacccggaaggaagacctaggggcggggaatttggaagacttcatgaagaactcagatattcttttcttcacacgttagccattccttacggctcttcacgttccacgcctagatgtgaagtgggacatagtcttccattgctggctgtccctgaggaaacagacatgagtcttggaggttctgaatgattttattgctaattatcacagtgacatagactagaacagaaattagaagcatagtaagattgccaaaatcagagaatcttgcaaagttctgtaattctaagtgttgttctagatttcctctagagaaggttattagaatctccattgcgtttctctttctccttctctttcccttgaggttaggaaacaggttaaaactcagagaactccaataataatggtttaaaaacatcaggggcttcctgtatctcctgtcaggaagccgaggaataagcaggctggggctggtgggcgtcaacatcccagttttgttctatctttctgtcccacctgcactgggatatgacttctacactcgaatttgcttcttggtttcaagacagtggtgttctttccatagctgagcagattattttgagaggtgggtgatatgtgagagagaaatctggaaccttcttctgggtagatacaggataagatagatacagggtaaaatgttgagcactttgtacatgctttgagagcataatctttgtcatctgtttttttcccctagacaatatcaggttaccgtcaacattaatccatttaaaaggacatggactgttgccattaatacttttggattccatataacccttaacacaataacttctagaaaatgtgtgtgccgtagacacaaagaagggaacaatagacaccagggtatacttgagggtggagggtggcaggagggtgaagattgaaaagctgcctattgcgtgttatgctggtttcctgggtgacaaaattacctgtacaccacacccctgtgacacacaacttactcatgtaacaaacctgtgcatgtaccccttgaacctgaaataaaaattggaaagt

SEQ ID NO: 2435 - DNA, 2370 bp, Homo sapiens
gcggttgtgtctgggaaggagagaaaatggcggcggagccgaacaagaccgaaatccagactctttttaagaggcttcgcgcagttccaaccaacaaggcctgtttcgactgcggcgccaagaatccgagttgggccagcatcacgtacggtgttttcttgtgcattgactgttccggggtgcaccgctccctgggcgtccatctgagcttcatcaggtccacagagttggattccaactggaactggttccagctgaggtgtatgcaggtcggcgggaatgccaatgcgctgggtgccaagaaaggccaaggggcccagaaggtgagcagccagagcttcagtgagattgagcggcaggctcaggtggcagagaagctccgtgagcagcaggcagccgatgccaagaagcaggcggaggagtccatggtcgcctccatgcgtctggcctaccaggagctccagattgatcgtaagaaagaggaaaagaagctacagaatctggaagggaagaagcgagagcaggcagaaaggttgggcatgggcttggtatcccgaagctctgtctcccactccgtgctgtctgagatgcaggtgattgagcaggaaaccccagtgagtgcaaaatcctctcgctcgcagctggacttgtctgacgatgttggtactttcgcctctggacccccaaagtacaaggacaatcccttttccttaggggaaagctttggctcccgctgggatacagatgctgcctggggtatggacagggtagaggagaaggagccagaagtgaccatctcaagcatccggcctatttcagaaagagccacaaaccggagggaagtggagagccggagctcaggcctcgagtctagtgaggcgcgtcagaaattcgcaggagccaaagccatctcatctgacatgttctttgggcgggaggtggatgcggagtatgaggccaggtctcggctgcagcagctctcaggcagcagtgccatcagctcttcagacctctttggggacatggatggagctcacggagcaggaagtgtatctctggggaacgtgctgcctacagcggacattgcccagtttaagcagggtgtcaagtctgtggctgggaaaatggctgtgctggccaatggtgtgatgaattccttgcaggatcgctacggttcctactgatccgagctctgtgactcaggcttacgatggtgacggcaacaagaactccacagttcccaggctggggatgctttgccttgtggaagctggggaggatttgttacttcgtatgtgtggtgtgtgtgtggggtggcctttgaggcgctcactcctgtgaggggaatggtcagtaccagcccttgtcctctgcctgtggactgagccctttattccctctcacaccaccctccgtgtgttagactcttgtccttctgtcctgcccccacagctgctgctcacttatcctgccatactgggaaagggggttcccccacgatggcttattctgggtccagactttccccaggtagggaaagcggaaggtagaaggcttttttttgctggctctagggttcttctagttcgaggccttgggtccccatcctctggaaccagggggaggcctggaaggagttcactgtagacccgtcccatggggaaagaggctgcggacttgctgctgctgctgctgccagtggcctcttctgggtgccaggagaggggaaggacctttgtctgggcgttaccaagggctggaaactttacctggtacctaaaggtttcatttgggatcagaccggagacccttgggttctcccgtctcaccacccctttctacagtaagcacttggaagattgtttcagggtgtctcagggtccctctgtaccatctgctgtggaatgcaggaccctctgtgacattctttatcccttcttccccgggttggtggccatggagggccttgtctgctgtgattcgactctggatgctgtgagcttgatgctggccagggaagcagaggatgtgagaggcagaggcaggctcctggggctgagctccttcctctgcatcattctgggcttggcctggacagcacccgccagtgagagctgtgggcctcaccctctggcagctgagccaagcactgtcattcttggtgccatcttcccctgccgcaccggcagtctcagcccagcccccacctttgggttgtaggttgggctcccaagcaacacagaccactcttccccttgcccctcccccagagggacttgactttctttctggactgtttgtattgaaacaaagtggtgtcaaaataaagcccctgcagggcctggctccctgttggtctgagtgaagcag

SEQ ID NO: 2436 - DNA, 2508 bp, Homo sapiens
aagaattggaggattttgataaagatggtgacgaagacgaatgtaaaggtactactttgactgcagcagaagttggaataattgagagtattcacctaaaaaacttcatgtgtcattcaatgcttggaccttttaagtttggttctaatgtcaactttgttgttggcaacaatggaagttggagtgcagtggtgcgatctcggctcaatgcaacctctgcctcccaggttcaagcgattctcctgtttcagccttgtgggaagagtgcagtactcacagctctcatagtcggtcttggtggaagagcagttgctactaatagaggatcctctttaaaaggttttgtgaaagatggacagaactctgcagatatctcaataacattgaggaacagaggagatgatgcctttaaagccagtgtgtatggtaactctatacttatacagcaacacatcagcatagatggaagtcgatcttataaacttaaaagtgcaacaggctccgtggtttccacgaggaaagaagagctgattgcaattcttgatcattttaacatccaggtggataatccagtttctgttttaacacaagaaatgagcaagcagttcttacagtctaaaaatgaaggagacaaatacaaattcttcatgaaagcaacgcaacttgaacagatgaaggaagattattcatacattatggaaacgaaagaaagaacaaaggagcagatacatcaaggagaagagcggcttactgaactaaagcgccagtgtgtagagaaagaggaacgttttcaaagtattgctggtttaagtacaatgaagactaatttagagtccttgaaacatgaaatggcttgggcagtggtcaatgaaattgaaaaacaattgaatgccatcagagataatatcaaaattggagaagatcgtgctgctagacttgacaggaaaatggaagaacagcaggtcagacttaatgaggcagaacaaaagtacaaggatattcaagacaaactagaaaagattagtgaagagacaaatgcacgagcaccagaatgtatggcattgaaagcagatgttgttgctaagaaaagggcctataatgaagctgaggttttatataaccgatccttaaacgaatataaagcattaaagaaagatgatgagcagctttgtaaacgaattgaagagctgaaaaaaagtactgaccaatctttggaacctgaacggttggaaagacaaaaaaaaaatatcttggttaaaagagagagtaaaggcctttcaaaatcaagaaaattcagtcaatcaagagatcgaacagtttcagcaagccatagaaaaggacaaagaagaacatggcaaaattaagagagaagaattagatgtgaagcatgcactgagctacaatcagaggcaactgaaagaattgaaagatagtaaaactgatcgactcaaaagatttggccctaatgttccagctcttcttgaagccatagatgatgcttatagacaaggacattttacctataaacctgtaggccctttaggagcttgcattcatcttcgggacccagaacttgctttggctattgaatcttgcttaaaagggcttctgcaggcctattgttgccataatcatgctgatgaaagggtccttcaggcactcatgaaaaggttttatttaccagggacctcacggccaccgataatagtttctgagtttcggaatgagatatatgatgtaagacacagagctgcttatcatccagactttccaacagttctgacagctttagaaatagataatgcggttgtggcaaatagcctaattgacatgagaggcatagagacagtgctactaatcaaaaataattctgtagctcgtgcagtaatgcagtcccaaaagccacccaaaaattgtagagaagcttttactgctgatggtgatcaagtttttgcaggacgttattattcatctgaaaatacaagacctaagttcctaagcagagatgtggattctgaaataagtgacttggagaatgaggttgaaaataagacggcccagatattaaatcttcagcaacatttatctgcccttgaaaaagatattaaacacaatgaggaacttcttaaaaggtgccaactacattataaagaactaaagatgaaaataagaaaaaatatttctgaaattcgggaacttgagaacatagaagaacaccagtctgtagatattgcaactttggaagatgaagctcaggaaaataaaagcaaaatgaaaatggttgaggaacatatggagcagcaaaaagaaaatatggagcatcttaaaagtctgaaaatagaagcagaaaataagtatgatgcaattaaattcaaaattaatcaactatcggagctagcagacccacttaaggatgaattaaaccttgctgattctgaagtggataaccaaaaacgagggaaacgacattatgaagaaaaacaaaaagaacacttggatcccttaaat

SEQ ID NO: 2437 - DNA, 2574 bp, Homo sapiens
acagcgccccgagcccaggcgcctccccgcccccctcccgcgctccgcggcggcggcggcggcggcagcagtagcagcaatatggctgttgatgggtgtttggggtggcgctggcggcgggaggagctcccccgagcccctgcgccggctgcccgttgctagctatggcaaatggtggcggcggcggcggcggcagcgcggagctggagcgggagtccgcctgaggccgcggttttacgcggagcgtcttccctggcgctcgaggtggctagatgtcgtcggctttagctattcctggtgcagacgcccaccggcactgaggctggcgacaccttcgatgtatggttgctaggctcactgcctggtctgtagtcgtgtccctagagatgtcttcccttccccacagccactggctggagtgggggacccgacactgatagaaaactgcagaataaaaaagaaagaactggaaaaaagagagtgagccagctgccttctttctgagtaattcccatcctaggggacttcacgcgcgaaccgttttggagggaagggaaatccaggggaatagtgcagggtagatacacattgcagcctccacatgttcacatcttttctagtaaagttaaaccgaggacccctcaaacttctacagggcacagcaacttgtagcagcctccttggcggctgagagaagtagggaagcctggggctatgggtgaaggctggctatgaaaacaccaggggggaaggagcctgtctctcctgatcattaattatacatcctgttgggtgctggagctcagctgtgttttgtggcagcacatttgtgttttggaaaatactggtgtattggaacaaagggagaaatatgaaaaccatcattctcttcgtcattctctggcttctccggaggcctgcaggtgctggtcggagagttttctttggaattaccttctcagccgtagaggtttcttcttatttgttaaggaggcaaacctcccaccttccagagaagccctcaggttaagcaaagccctatacaccagatccctgactagccttcctgctgagaacagcttattcctggagccttcaaattcccacattccctctctccatccttctcctccacctcccccaacagtctcgggaattttgttccccggtttactgagattcagcgactgtctttaggggaaagatagctcatagttgtgtgcctctgaaatgttccctagatagagtgatctgggtgaactttttaacagcttgctttctttcaggcagggggcaatttttatcataatgaaaactttttcaatgattgaaaataagttgtggtgtttttgtgaacctggggtcctaaacacagcttccaaagtctttttatgttagggagtacataaatgcaattgcagtgtctgtaatgaaatgctaatcccatcgcacacacaaaggatctcctaaatgatgagcaagcataacttctgtcagtttactcaagaaaataggtttttggcaacgattagaaaaaacaattcgtaaatatttggctatgttttgtagccccaagacctgctgagtggacataactggaagtgagttgctgtaagaaatctgccagggatgagaggtgatggtggtttgtttggaagatgtgaggccagtatagaatgagtgcaggttccttttgataccgtaagtccattttaaagcacacctagaatctcttgatacctgcccctagatttgctcacttaagccataggtagccagctcattatatgcagtaacggtaagttaggccttttaaaagcttttctttctatgcttgaggtctgtatttttattgcaattgtgtgtgtgtgtgtgtgtgtgtgtgtgtgtgtttgtctttttttcttttttctttccaagtatttggtagttttgtcaagactcgatacacaggcatgtatttggcttaagcttagaataataatttttgtgctagatttcccaagaaaacataggctgcctttccagaaaattctaccagccctcagatgggttcaccctcaccctccttcagccccaagatggtttgatcaagagctggagtccagaggaaagcaggtcttttgtagcatctgaaattctgtgggagataaaattcagcaaggagctccaatttcatgagcgtttggtctctgggatcgcaccaaacctttttgatcaaaggaacccaagactgtggacatgcatcgtgggacatctcttcattagtacctttggcctctgaatctcaaacagtgaatgactttagtcttttgaaaagagtggcatgtggactttttcagaaagtgaagaagaaaacattacaatttcctcctgttgggaacttggtcacagtcattccagtactgtgttctttgctgtactttttcacattattgtttttttccttgtgggatttcatcagagctctctattcacttgggtgtgacgttgtgaagttcaatcctgtcatagactatattgaatagggagctgctctggtagcctgaataaagccatgactttgaagaagtt

SEQ ID NO: 2438 - DNA, 2484 bp, Homo sapiens
attttccggcctgggggcagggcctcgggttcctgcatcgggcctgagcagaactaggcgcgccgcggcccggcacgcgcaggcgtacagagctccccgggggtgccagttcctctccgattcccggcttctgtcaccttcctcacggaccttggtcacggccgcagggtcatggaggacgctggcggcggcgaggagaccccggccccggaggccccgcacccccctcagctcgcgcctccggaggagcaggggttgctcttccaggaggaaaccatcgatcttggcggagatgagtttggatccgaagagaacgagaccgcatcggaaggctcgagtcctctcgcggacaagctgaacgaacacatgatggagagcgtcctcatctctgactcccccaacagcgagggcgacgcgggcgacctgggccgagtgcgggacgaagctgagcccggaggggaaggcgacccaggcccggagcccgcgggcaccccgagtcccagcggcgaggccgacggcgactgtgcccccgaggacgcggcacccagtagcggaggggccccgaggcaggacgcggcccgcgaggtcccaggcagcgaagccgcgcgcccggagcaggagcctcccgttgcggagccggtcccggtgtgcaccatcttcagccagcgcgcgcccccagcctccggggacggcttcgagccgcagatggtgaagtcgcccagcttcggtggcgccagcgaggcctcggccaggacaccgccccaggtcgtgcagcccagccccagcctcagcacgttcttcggagacacggccgccagccactccttggcctcggacttcttcgactcctttactacctccgccttcatttccgtcagcaatcccggcgcgggctccccggcccccgccagcccgcctcccctcgctgtgcccgggaccgaggggcgccccgaacccgtggccatgcgagggccccaggcagctgcgcccccggcgtcgccagagcctttcgcgcacatccaggcagtgtttgcagggagtgacgacccctttgccaccgccctgagcatgagcgagatggaccggaggaacgacgcctggcttcccggcgaggctacgcgtggagtcctgcgggccgtggccacccagcagcgcggcgccgtgttcgtggacaaggagaacctcaccatgccgggcctcaggttcgacaacatccagggagatgcagttaaagacttgatgcttcgctttctgggtgaaaaagctgcagcaaagagacaagtcctaaatgccgactcagtggaacaatcttttgttggattgaaacagctaatcagctgcagaaactggagggcagcagtggacctgtgcggacgtctcctcacagcccacggccagggctacggcaagagcgggctgctcaccagccacacgacagattcactgcagctctggtttgtcaggctggcactactagtgaagttgggccttttccagaatgctgagatggaatttgaacccttcggaaatcttgatcagccagatctttattacgagtactacccgcacgtgtaccctgggcgcaggggctccatggtccccttctcgatgcgcatcttgcacgcggagcttcagcagtacctggggaacccacaggagtcgctggatagactgcacaaggtgaagactgtctgcagcaagatcctggccaatttggagcaaggcttagcagaagacggcggcatgagcagcgtgactcaggagggcagacaagcctctatccggctgtggaggtcacgtctgggccgggtgatgtactccatggcaaactgtctgctcctgatgaaggattatgtgctggccgtggaggcgtatcattcggttatcaagtattacccagagcaagagccccagctgctcagcggcatcggccggatttccctgcagattggagacataaaaacagctgaaaagtattttcaagacgttgagaaagtaacacagaaattagatggactacagggtaaaatcatggttttgatgaacagcgcgttccttcacctcgggcagaataactttgcagaagcccacaggttcttcacagagatcttaaggatggatccaagaaacgcagtggccaacaacaacgctgccgtgtgtctgctctacctgggcaagctcaaggactccctgcggcagctggaggccatggtccagcaggaccccaggcactacctgcacgagagcgtgctcttcaacctgaccaccatgtacgagctggagtcctcacggagcatgcagaagaaacaggccctgctggaggctgtcgccggcaaggagggggacagcttcaacacacagtgcctcaagctggcctagctgcctccaacacactacgtcaggaggacccgggtctttgaaactgtgtcttgaagctaatgtattaatgtgacatggaggaactcaataaaactcctgcttcac

SEQ ID NO: 2439 - DNA, 3283 bp, Homo sapiens
acgacgacaaaatctacttcttctttcgtgagacggcggtagaggcggcgccggcactgggacgcctgtccgtgtcccgcgttggccagatctgccgggtgaggagtccctgggccacacccggcgaccctgcccctacccctttgcctgccctggtctcgccctcatcccctttgatcgtcccggcagaacgacgtgggcggccagcgcagcctggtcaacaagcggacgacgttcctgaaggcgcggctggtgtgctcggtgcccggcgtcgagggcgacacccacttcgatcagctccgtgagtgcgggagtgggtatggggttggggaggggggcagcggcgcagactccgggagcccccgccgcagcggggctgtgcgccctaccccagctaggccccttccccgcagaggatgtgtttctgttgtcctcgcgggaccaccggaccccgctgctctatgccgtcttctccacgtccagcagcatcttccagggctctgcggtgtgcgtgtacagcatgaacgacgtgcgccgggccttcttgggaccctttgcacacaaggaggggcccatgcaccagtgggtgtcataccagggtcgcgtcccctacccgcggccaggcatggttcgtagcccagggacttctgctacaacccacttcaaagcctcaagggtttgagaacttggcctggggtcttcttggtgaatgtggtttcttcctttagttatgggtgggaaaacgtttccatcataagacaaggcttgtttcccgcctctgacttcctagggcaaggctgatctcctctctaattctcagggcagggttctgtccccatccccctccatgttcccagaggctgggcatggagggctgcctatcaagcccccatatctatatccctgctgtgcctccctttcccccacccccagtgccccagcaagacctttggcaccttcagttccaccaaggacttcccagacgatgtcatccagtttgcgcggaaccaccccctcatgtacaactctgtcctgcccactggggggcgccctcttttcctacaagttggagccaattacaccttcactcaaattgccgcggaccgggttgcagccgctgacggacactatgacgtcctcttcattggcacagacgttggcacggtgctgaaggtgatctcggtccccaagggcagtaggcccagcgcagaggggctgctcctggaggagctgcacgtgtttgaggtgaggcctcacccccagtcgcccgggacccccccaccccactaagccctgaccccgtcgcccctcctccctctcaggactcggccgctgtcaccagcatgcaaatttcttccaagagggtgagtgaccaggatgggggtcggggtgggatggactgagcttgtgcctggcgcgtcccaagcctctggccccttttggtagtttgcagtcccgggtttgagtacaggctctggctttgttagactgtgtgacctgaggcgtaagacctcagtgttcccatctgtcgagtggaagaagggatccctgaccgatgggaggcaggcgtggggtcgccctcggtcagcccagagcccctcgtgccccctagcaccagctgtacgtagcctcgcggagcgcggtggcccagatcgcgttgcaccgctgcgctgcccacggccgcgtctgcaccgaatgctgtctggcgcgtgacccctactgcgcctgggacggggtcgcgtgcacgcgcttccagcccagtgccaagaggcggttccggcggcaagacgtaaggaatggcgaccccagcacgttgtgctccggagactcgtctcgtcccgcgctgctggaacacaaggtgttcggcgtggagggcagcagcgcctttctggagtgtgagccccgctcgctgcaggcgcgcgtggagtggactttccagcgcgcaggggtgacagcccacacccaggtgagccttactccgccctccccgccaggctcctgtcccaccccctgcatccaggagaggccccgccctacccaacgaagccccgtccaaccagacccactccccgccctgtccagtttggtccctcacctgcactccacaagctgctgaggccccattgcgtccaacggggctcccgacccgcctcccctgaatcaaggagaagacccgccctcgaccctcccattaaggtccctgaccacccccccccacgttcatgtaaaccccgcctctttcggattctcccttgaagaccaccagctcccaaacactcagccttaaaatgtgcgcctgcgggcacccctttcccgctccacctcggctcccaatgactctttgcttcttccgtcgcgtgctagggcccggaagccctgttcccggcccgacacccccgcctcacgctgccctctgcccgcaggtgctggcagaggagcgcaccgagcgcaccgcccggggactactgctgcgcaggctgcggcgccgggactcgggcgtgtacttgtgcgccgccgtcgagcagggctttacgcaaccgctgcgtcgcctgtcgctgcacgtgttgagtgctacgcaggccgaacgactggcgcgggccgaggaggctgcgcccgccgcgccgccgggccccaaactctggtaccgggactttctgcagctggtggagccgggcggaggtggcagcgcgaactccctgcgcatgtgccgcccgcagcctgcgctgcagtcactgcccctggagtcgcggagaaagggccgtaaccggaggacccacgcccctgagcctcgcgctgagcgggggccgcgcagcgcaacgcactggtgaccagactgtccccacgccgggaaccaagcaggagacgacaggcgagagaggagccagacagaccctgaaaaaaaggacgggttggggccgggcacattgggggtcaccggccgatggagacaccaaccgacaggccctggctgagggcagctgcgcgggcttatttattaacaggataacccttgaatgtagcagccccgggagggcggcacaggtcgggcgcaggattcagccggagggaagggacggggaagccgagctccagagcaacgaccagggccgaggaggtgcctggagtgcccaccctgggagacagaccccacctccttgggtagtgagcagtgagcagaaagctgtgaacaggctgggctgctggaggtggggcgaggcaggccgactgtactaaagtaacgcaataaacgcattatcagccaaagctggaatggccccagcag

SEQ ID NO: 2440 - DNA, 2265 bp, Homo sapiens
tgtgcagcccgactaggggcggcggcgcaaccacctgacagaggcccgggcgctcgatgcaccttccgcccgcatgaggaggagaggccggtagaggactgtgaaccaaaagttgtcccccaggatggacttcaccgcgcagcccaagcctgccactgccctctgtggcgtcgtgagtgccgacgggaagatcgcttaccctccgggggtaaaagagatcaccgacaagatcaccacggacgagatgatcaaacgcctgaagatggtagtgaaaacctttatggatatggatcaggactcagaagatgaaaaacagcagtatctcccactagccttgcatcttgcatctgaattcttcctcaggaaccccaataaagatgtgcgtctccttgtagcatgttgtttggctgatatctttcgtatctatgccccagaagctccatatacttcccatgataaacttaaggacatatttttgtttattaccagacaattaaaaggtttggaggatacaaagagtccacagtttaatagatacttttatttattagagaatttagcttgggttaaatcatataacatctgctttgaattggaagattgcaatgaaatttttattcagctttttagaactctcttctcagtgatcaacaatagccacaataagaaggtacaaatgcacatgctagatttgatgagttctatcatcatggaaggtgatggagttactcaagaattattggactccattcttattaacctcattcctgcacataagaacttaaataaacagtcctttgaccttgcaaaagtgctattgaaaagaacagtccagactattgaggcatgcattgctaattttttcaatcaagtcctggtgctgggaagatcatcagtaagtgatttgtcagaacatgtatttgatctgattcaggaactttttgctatagatcctcatttattattatccgtcatgccacagcttgaattcaaactaaagagcaatgatggagaagagcgattagctgttgttcgacttctagctaaattgtttggctccaaagattctgatttggcaacacagaatcgtcctctttggcaatgttttcttggacgatttaatgatattcatgttcctgtgagattagaaagtgtgaaatttgccagtcattgtttaatgaatcacccagatttagcgaaggatctcacagaatatttaaaggttagatcacatgatccagaagaagctattcgtcatgatgtcattgttactataataacagctgccaagagggacctggccttagtaaatgatcagctgcttggctttgtaagggaaagaacactggataaacggtggcgagtaagaaaagaagctatgatgggtctggctcagctttataagaaatactgtcttcatggtgaagcaggaaaggaagctgcagagaaagtcagctggataaaggacaaacttctgcatatttattatcagaacagcattgacgacaaactgttggtagagaaaatctttgctcagtatcttgtcccccacaacctggaaacagaagagagaatgaaatgcttatattacttatatgctagtttggatccaaatgctgtaaaagctctcaacgaaatgtggaagtgtcagaacatgcttcggagccatgtacgcgaactattggatttgcacaagcagcctacatcagaggctaactgttctgccatgtttggaaaactgatgaccatagcaaagaatttgcctgaccccgggaaagcacaagattttgtgaagaaatttaaccaggttctcggcgatgatgagaaacttcggtctcagttggagttattaattagcccaacctgttcttgcaaacaagcagatatttgtgtggttagtaaatcatacttcacactttttctctagctttacttacagaaatatgtattttattaaagcctgttttacatacagtgatttgtgtaaatgtaacaatattgtgagctctgaattactttggagcatatctattgtcaagttaattctctatttaccattcactctcagccacattccaggaaaataactaaagaactaagccagggagattggtcttaggaattttacaagataaagtactttgaacttagtagacattcattgagtaatgataagtattttctgaatgcttgtgtacatgtgcattttcttctttcatgtattagaatggaaataatcgtcaataaattagtagtagtaacatt

SEQ ID NO: 2441 - DNA, 3051 bp, Homo sapiens
ctttgttttctcatttttacttgtcatgatgtatgtcgaacacattatttttagtgtctggtgttccattatacagatgtctctcttgttggttgaatttttgcattcacagaccctcaagttggattcatatctttttacactaagcataaagaagacggattggggtcgggtgtggtggctcacgcctgtaatcccagcacttcgggaggctgaggtgggcggatcacgaggtcaggagttcgagaccagcctggccaacatactgaaaccccgtctctaaaaatatgaaaaaaaaattagccaggcgtggtggtgcgcagctgtagccccagctacttgggaggctgaggcaggagaatcacttgaacccaggaggtggaggttgcagtgagcatattgcaccattgcattccagcctgcacgacagaggaagacgccatttcaaaaaaaaaaaaaaaaagacggattgattttcttcagcagtatcaagtggcacttaccatccacccctttaacacccaaaccattctaatccatgtatacagaccatcatctgtttcgttattgtgttctataatgcagctttgcgagttatgcagttttggtcctcatgatatttttctgattggtttttaatgtattttgttctaacgagccaacattgttatacatgtaatttgtttatttgctagattgtactctttcccaaagatgggctatgaactagcatctactttcattttacctatttacctgtaaacattgaaaaaactgaatcaaatgcagtgatatcggacctagttttattgttatgccttataatgaatttaacttcacagttttctaaatgagagcatttcccaaagacatctttatggtcataaccagtttcccttggcatttgatttatttttatttttatttatttatctttttgagaaggagtttcgctcttgttgcccaggctagagtgcaatggcgtgatctcgggtcactgcaacctctgcctcccgggttcaagcgattctcctgcctcagcctccaagtagctgggattacaggcatgcaccaccacgcccgactaatttgtatttttagagacggggtttctccgtgttggtcaggctggtctcaaacttccaacctcaggtgatccgcccgccgtggcctcccaaagtgttgggattacaggcgtgagccacagtgtctggcctgatttgtttttaagagcattatttttctgctttattttgtgacttcaacatttgacacaattttgggtgaatggtttgtgcatggtgcctgacatcgtgttttgatgtgtagtatatgccataggacatgtgagacaagatatgtcccaacttgaccttgttttgtattgtttatgtcaaggtgttgagtgtattagatatactgttggggctctgtgttctagctctgccttttagataataaccatggttaaatattgcaatgtcctgcatgtctccacacatgggttttgtaactgagtcagaatgataagtgattagtaagcacattttttctcctttcaggaaaccactattttccttttctacatgctgttttgtaagtagtacttttatgaaggttgtcttcaaatgttcgcatcttccatttctactgcccttgggttatccatcctgtcattttgtgccaatcacttttttttttaacttttaagttcagggatgaaagtgtagatctgttacataggtaaacttgtgtcatggggttgttgtacagattatttcatcacccaggtgttaagcctagtatgcactagttgtttttcctgatcctctccctgctcccaccctccaccctctgataggccccagtgtgtgttgttcccctctgtgtgtccatgtgttctcatcatttagctcccacttacaagtgagaatgtggtgtttggttttctgttcctgcattagtttgctaaggataatggcctcgagctccatccaagtccctgtaaaggacatgatcttgtacttttttatggctgcatagtattctgtggtgtatatgtaccacattttctttatccagtctatcattaggcatttaggttgattccatgtttttgctattgtgaatagtgctgcaatgaacatacatgtgcatgtctttttataatagaatgatttatattctgttgtgtatatacccagtaatgggattgctgagttgaatgctatttctgcctttaggtctttgatgaattgccacactgtcttccacaatggttgaactaatttacactcccaccaacggtgaataagtgttcacttttctccacaaccttgtcagcatctattattttttgactttttagtaatagccattctgactgctcacatctattttgtaaataaagttttattgaaacatggccttacccatttgtttacatatattcatggctgtttttgtgccacaatgtcagagttgtcttaaagtagacagagactatctggctgtaaagcctgagatatatactaactggttctttatgtaaaaagtttgctgaccacctactctaaacgttttgcagtgatggtagtgttggcaaaaaaccaaatagcttaccctctttaaatttcccttttacttcttacaaactcctaacaccatttacgactttgtcatcaatatggtcaactaagcttggtttgcatggctctacttcctttcaccttccacttaggcagtgtctccaagtccactgcagtttctatttgtctcctgactgttactgtatcagttcttacctaaataacataacaactgatctccctactttttgcctatgccctcaaatgtgctcattgttgatctatctccctgttaggtgttctttttctcctctttagaaagcagccaaggaaaccagggttctctcaaagtggaaaatactggaacttatgtactgttatcataatgatagttggtgttttgaattataagaatgattccaggtggtttctaaatcatccaataaagctgtattcactctgt

SEQ ID NO: 2442 - DNA, 3003 bp, Homo sapiens
ggttgctcgcgctcgggcaggcgggctgaggaggctgccgcgcccccgccgccgccgccgcgggggaagcctgggagccagatcggcgtcgcctcggcctccgtaacccccgcctagccgggccatggcggaacgcggaggcgccgggggcggcagcggccagcggggatccggggtcgcccagtcccctcagcagccgccgccgcagcagcagcagcagcagccgccgcagcagccgacgccccccaagctggcccaggccacctcgtcgtcctcgtccacctcggcggcggctgcctcctcctcgtcctcgtctacctccacctccatggccgtggcggtggcctcgggctccgcgcctcccggtggcccggggccaggccgcacccccgccccggtgcagatgaacctgtacgccacctgggaggtggaccggagctcgtccagctgcgtgcctaggctattcagcttgaccctgaagaaactcgtcatgctaaaagaaatggacaaagatcttaactcagtggtcatcgctgtgaagctgcagggttcaaaaagaattcttcgctccaacgagatcgtccttccagctagtggactggtggaaacagagctccaattaaccttctcccttcagtaccctcatttccttaagcgagatgccaacaagctgcagatcatgctgcaaaggagaaaacgttacaagaatcggaccatcttgggctataagaccttggccgtgggactcatcaacatggcagaggtgatgcagcatcctaatgaaggcgcactggtgcttggcctacacagcaacgtgaaggatgtctctgtgcctgtggcagaaataaagatctactccctgtccagccaacccattgaccatgaaggaatcaaatccaagctttctgatcgttctcctgatattgacaattattctgaggaagaggaagagagtttctcatcagaacaggaaggcagtgatgatccattgcatgggcaggacttgttctacgaagacgaagatctccggaaagtgaagaagacccggaggaaactaacctcaacctctgccatcacaagggtgagcctcaaaggtctggggagtggttggctaagattttcagtctgggggtaggttggcagcagcatattcaggcctagtggagacttcttaaaatcaacacagggtcatcccttcaacgattccaatgaacgctctatatcctcaccaccgcccaattagactcactgttgttgggaaccacaattactgataagagtgttatatccttcaggttatcgtcagatagaaaaaaggaggagaacccttcttgtagaattcagaacagatagtggtccatcagggaacagaccgcctcccacccactccagtggctgcttcatgtcacatgctgtcctctgcagcgagaaagccagctccctctaggagtagcactagttttaatcatgtgctgaacttaggcagagataataggctagtcatggggtgctcctatgaccctgggcttgctaagctttaattacatcagatatcgttcctgccttaacggatccataaccttggagaccaggtgccttttgatacttttcctccataagacttcctcaagagtcactgttttgatgacatttgagtcctgaactaagaagctaaaaacctgaattcctaggtggtctttgacagattctggagtgcctgcatgaagtgtgggagggccagaagtgctgggagcatttccgaaggggaattcacagctccatttacccagaggcatcctgattctccccagtgcagagctagcctagggaccaaccccctgagagccgagatgcccaccccttcagggatgaaacggaggccagatcactctcccatcacaatgaggtgtcactggacttcaggtaaatccgtgagactgtgacctggatttcccatccagtcagcaactagggagcgggaggactgtttccttgtcctcaggtatccacctctcaattggtgctccaaatggtccccatgaggtgtgtcaccagtaccccaaatgcttgacctccattgcactctggaaatagggagtggctgtaggatctctctctagtcagcccctactgctgaggctttctttttcctgctctgtaaccagaaagcggccctattttcttcccaacgggtgcccccagagcttcataagtcacctcttcctacgtggggtctcttccttggcatgaccctggcacatgactggagttcagtgctcctgctaatgtatactcccccagaggtgtttctttttaagctgcaggcactttccagttctatcccagagactcagtgacctcccttagtgcctgtctcctctgtgcatgcgcattcttctctcccaccaagaacacagatgtacttgaccttctgtgaacatgtctcatgctgctctgtcactgggagctcgactttttttctctgctgtgaatgccctttctgccctttctctgaagacctatcagcctcgcaagttcattgttttcatccccagatggcgagtctgtcattcaggcaggaagtacatacaaccacaggctaagcatcgtgcccagagacaaagagatagggcccagtccatgccatcaagcgcacagtgtctagtgacaccacacatttcaacaaataattacagcccagtaggacaggtgccataagacagagctttgcaatgacaccaggggactgtggccacctgtcccaggagtgccaggacagcttcccagatgagatgctgagagatgggttttttaaaataaaacttcaccaagtggatttggggaaaatttttattcaaggcagaagataccctatataaagacccagtacagtgctgtggctcacgcctgtaatcccagcactttgggaggccgaggcaggcgcatcacaaggtcaggagatcgagaccgtcctggccaacatggtgaaaccccgtctctact

SEQ ID NO: 2443 - DNA, 2493 bp, Homo sapiens
ttttctgcctgaaacctctggctggtggtgcctttacctgtgttttgctcgggcccactgggttcgttctgtccactcggctcatgctagtggtttggatcccacacttgccaagggtgagctgggtacagagcagtgaagggtgtgtgagcaagcaagcatgggatctggccactgcacacagtcaagcatgccagctgcagtggggtgggcagctccaggcaccggcacaggtgccagctccctgtgaggctgcagctggacaaggccgactgcaaacagcttccactgtgggtatcagggaatgcagtggcgcccagaaacttggagatgcaggaactgcagaaccccaaagaaggcatcatagccctggcttggggagctcctaggtctgggctccctgaagggccacagctcttgtctcctctcttctcttcttcttgcctgcaatttggcaagcaaggggtgcgtttcagccctgtttatgttacacctctttcagccctgctagttggcaggtcccgagttcttgtcctgagtccaggaagaatgaggtatgtgggcaagtagaaggtgagcaaggtgaagaggtgctttattgagcaactgttcagctcagaggagacctgcagtcggtagctcctttctgcaggcaagtcatcccaacgtctgttcagctctcagcagctgagagagatgcactgtggttagctgtgcccacattgccgaggctgttcgagctgaggagtgccttcaggccagtgctgagccacacttagacccacctcaacctccctcttgtgctcgtcagtgcccaaagtctggagggggctgaggtggcagggggctggcatgtcagcactgccttgagcttgcacaaaccaggccgggttccgactgtgcctgggttcagcctcaacttggatccgaggttggagtgggctctgggagtggagagacgccaggtggtgggaccaggtacaactgagcctgtgggggcaggggggcttgctgggcctctgagagtgcaaagatgcccaggtttgcagtcatggctggatggctgcagctgtgcctgggagggcggggctcctgcctgccaatttagaaggggtggggctcccaccctttcctggctcccaccagcttcgaggagcgcacagccccagccactcctcctcactgcagccagtgtctccgtagcaactgctccacatgggccactgctgccatcacagagcagtccttgcaggtgcctttcttgtacttcagcactcctgggggtcattagaagccctagcaacactgctcaccacactatagctccggaggccctagcagtcctgctcccacagatcccacttctgacaccatctgttaaaagaaaatcttcagctgaattaaatttaaaggaacttaattgagaaatgaatgattcacgaatcaggcagcccccagaatcacagcagatttggtgagactccagcacagctacatagtggaagatttatagacaataaagggaacgtgatgtacagaaatctgagtgaggagtgaggtccagaagcaactgggtcccttaccgttctcagcaatgtggtccagaaacaactggactggttacagtgctcagcttttgccttatttgaacacagctgaacactcagcagtgtgtgagtggcagaagtttggctgttgggattggccaggactcagctatagttacaggtgcatactcctaagttaggttttcagtctttctacctattaagttaggtttcagtttgtccacagggactcaagtctagaagtacagagtccttcccaggccatatttagttcactgtaacagttcctattatgacctcactgacagttctttttctctgaattctcctttcttctcaacagcttatccaaatgttccactggtccctgttcatcccgccctgcagttctccttgactgattcagccctttgtggtttgccgtcctgtttctctacagcttggacctcttcagtctttccatcataggtttaactctctgttgaatgcttctttgtagctatgcaaaagttaccttaagctcaaaaaattcaaagtgaaagccacatcctcctctcttcctttatgtgtatggtattactaccatgcagccagtgacccaaaatgggatttcttctgggcttttcttgcttagattcaggctcatctggtgtcaagccttgttacttttgtttccttgttcttttatttttaattttttttcttttgagacagagtttcactcttgttgaccagcctgggcaacacggtgaaaccccgtctctactaaaatacaaaatattaactggacgtggcagcgtgtgcctgtaatcccagctagtcaggaagctgaggcaggagaattgctagaacctggcaggaggaggttgcagtgagccgagatcacgccactgcactccagcctgggcaacagcgactctgtctc

SEQ ID NO: 2444 - protein, 543 aa, Homo sapiens
MARQHARTLWYDRPRYVFMEFCVEDSTDVHVLIEDHRIVFSCKNADGVELYNEIEFYAKVNSKDSQDKRSSRSITCFVRKWKEKVAWPRLTKEDIKPVWLSVDFDNWRDWEGDEEMELAHVEHYAELLKKVSTKRPPPAMDDLDFTTTVVSCCPAELQTEGSNGKKEVLSGFQVVLEDTVLFPEGGGQPDDRGTINDISVLRVTRRGEQADHFTQTPLDPGSQVLVRVDWERRFDHMQQHSGQHLITAVADHLFKLKTTSWELGRFRSAIELDTPSMTAEQVAAIEQSVNEKIRDRLPVNVRELSLDDPEVEQVSGRGLPDDHAGPIRVVNIEGVDSNMCCGTHVSNLSDLQVIKILGTEKGKKNRTNLIFLSGNRVLKWMERSHGTEKALTALLKCGAEDHVEAVKKLQNSTKILQKNNLNLLRDLAVHIAHSLRNSPDWGGVVILHRKEGDSEFMNIIANEIGSEETLLFLTVGDEKGGGLFLLAGPPASVETLGPRVAEVLEGKGAGKKGRFQGKATKMSRRMEAQALLQDYISTQSAKE

SEQ ID NO: 2445 - protein, 280 aa, Homo sapiens [sequence omitted]

SEQ ID NO: 2446 - protein, 230 aa, Homo sapiens
MAGAHYPLHCLHSAAAAAAAGSHHHHHHQHHHHGSPYASGGGNSYNHRSLAAYPYMSHSQHSPYLQSYHNSSAAAQTRGDDTDQQKTTVIENGEIRFNGKGKKIRKPRTIYSSLQLQALNHRFQQTQYLALPERAELAASLGLTQTQVKIWFQNKRSKFKKLLKQGSNPHESDPLQGSAALSPRSPALPPVWDVSASAKGVSMPPNSYMPGYSHWYSSPHQDTMQRPQMM

SEQ ID NO: 2447 - protein, 323 aa, Homo sapiens
MILQETKAACGIPAIPHCSRVEILDAKTREKLCFLDKVEPHATIAEIKNLFTKTHPQWYPARQSLRLDPKGKSLKDEDVLQKLPVGTTATLYFRDLGAQISWVTVFLTEYAGPLFIYLLFYFRVPFIYGHKYDFTSSRHTVVHLACICHSFHYIKRLLETLFVHRFSHGTMPLRNIFKNCTYYWGFAAWMAYYINHPLYTPPTYGAQQVKLALAIFVICQLGNFSIHMALRDLRPAGSKTRKIPYPTKNPFTWLFLLVSCPNYTYEVGSWIGFAIMTQCLPVALFSLVGFTQMTIWAKGKHRSYLKEFRDYPPLRMPIIPFLL

SEQ ID NO: 2448 - protein, 680 aa, Homo sapiens
METRAAENTAIFMCKCCNLFSPNQSELLSHVSEKHMEEGVNVDEIIIPLRPLSTPEPPNSSKTGDEFLVMKRKRGRPKGSTKKSSTEEELAENIVSPTEDSPLAPEEGNSLPPSSLECSKCCRKFSNTRQLRKHICIIVLNLGEEEGEAGATKIVPVEAGPPETGATNSETTSADLVPRRGYQEYAIQQTPYEQPMKSSRLGPTQLKIFTCEYCNKVFKFKHSLQAHLRIHTNEKPYKCPQCSYASAIKANLNVHLRKHTGEKFACDYCSFTCLSKGHLKVHIERVHKKIKQHCRFCKKKYSDVKNLIKHIRDAHDPQDKKVKEALDELCLMTREGKRQLLYDCHICERKFKNELDRDRHMLVHGDKWPFACELCGHGATKYQALELHVRKHPFVYVCAVCRKKFVSSIRLRTHIKEVHGAAQEALVFTSSINQSFCLLEPGGDIQQEALGDQLQLVEEEFALQGVNALKEEACPGDTQLEEGRKEPEAPGEMPAPAVHLASPQAESTALPPCELETTVVSSSDLHSQEVVSDDFLLKNDTSSAEAHAAPEKPPDMQHRSSVQTQGEVITLLLSKAQSAGSDQESHGAQSPLGEGQNMAVLSAGDPDPSRCLRSNPAEASDLLPYTHPTPSPLASRFKQRLPVPLSIFPESQPQLLDPHLGAKCSSATAMQSGERETAIT

SEQ ID NO: 2449 - protein, 153 aa, Homo sapiens
MHVCTPHREVVLGGVSRGLSPPVQGLTLQLCLLQTVFPLLMTLFELARNPNVQQALRQESLAAAASISEHPQKATTELPLLRAALKETLRLYPVGLFLERVASSDLVLQNYHIPAGVLKHLQVETLTQEDIKMVYSFILRPSMFPLLTFRAIN

SEQ ID NO: 2450 - protein, 248 aa, Homo sapiens
MFAVGCSMGPFLHYWYLSLDRLFPASGLRGFPNVLKKVLVDQLVASPLLGVWYFLGRLVRVACCAVRELPLRAPPISSHLHQRPDAGLGHVPVLLEVPEPSSSDTPRLCGPGHPSRLNCLLPGPDARLSPGGPPPLTEGEWAPAASSGLEPRPSTTSAPEHWAEPPFPSSLLGLSFLNRNTPMKMDDHPLALLSRNLMRPVTKMSHPQHRAHSANQSQAPAPQHCHPPGSGPSHQSRAPSGPGTKAGT

SEQ ID NO: 2451 - protein, 731 aa, Homo sapiens
MVVDDLFEDMKDGVKLLALLEVLSGQKLPCEQGRRMKRIHAVANIGTALKFLEGRKIKLVNINSTDIADGRPSIVLGLMWTIILYFQIEELTSNLPQLQSLSSSASSVDSIVSSETPSPPSKRKVTTKIQGNAKKALLKWVQYTAGKQTGIEVKDFGKSWRSGVAFHSVIHAIRPELVDLETVKGRSNRENLEDAFTIAETELGIPRLLDPEDVDVDKPDEKSIMTYVAQFLKHYPDIHNASTDGQEDDEILPGFPSFANSVQNFKREDRVIFKEMKVWIEQFERDLTRAQMVESNLQDKYQSFKHFRVQYEMKRKQIEHLIQPLHRDGKLSLDQALVKQSWDRVTSRLFDWHIQLDKSLPAPLGTIGAWLYRAEVALREEITVQQVHEETANTIQRKLEQHKDLLQNTDAHKRAFHEIYRTRSVNGIPVPPDQLEDMAERFHFVSSTSELHLMKMEFLELKYRLLSLLVLAESKLKSWIIKYGRRESVEQLLQNYVSFIENSKFFEQYEVTYQILKQTAEMYVKADGSVEEAENVMKFMNETTAQWRNLSVEVRSVRSMLEEVISNWDRYGNTVASLQAWLEDAEKMLNQSENAKKDFFRNLPHWIQQHTAMNDAGNFLIETCDEMVSRDLKQQLLLLNGRWRELFMEVKQYAQADEMDRMKKEYTDCVVTLSAFATEAHKKLSEPLEVSFMNVKLLIQDLEDIEQRVPVMDAQYKIITKTAHLITKESP

SEQ ID NO: 2452 - protein, 157 aa, Homo sapiens [sequence omitted]

SEQ ID NO: 2453 - protein, 105 aa, Homo sapiens
MGIGTGHTSMNKGGKDVTLLDLSVEKRRWRINMETSKIILEKMQSDDVLDGNRERSNEREGRDSLSEKLKSKQNLKDEEKLRYIKTGKSIQVEGTVRAKALRWVQ

SEQ ID NO: 2454 - protein, 203 aa, Homo sapiens
MPGPLTCTPAWQGQGRAAAFLCCSFQRAGAVVGVPARWHRGRLSSQQRLRSSLGGSHPCPQLGRRLVREGVISVPRQQGRRRCRESFSPADVAPGPICSANICLSGVRFLTCLNRVREHVVGPSPSPAAPICFFPVVEALCTLRGRRCHCLPFPKRGMQRWMLPLRRGARLLPLASSKNPRARSPGLDPLGSSETLWSHRGGH

SEQ ID NO: 2455 - protein, 637 aa, Homo sapiens [sequence omitted]

SEQ ID NO: 2456 - protein, 102 aa, Homo sapiens [sequence omitted]

SEQ ID NO: 2457 - protein, 252 aa, Homo sapiens
MVTARQEPRLVLISLTCDGDTLTLSAAYTKDLLLPIKTPTTNAVHKCRVHGLEIEGRDCGEAAAQWITSFLKSQPYRLVHFEPHMRPRRPHQIADLFRPKDQIAYSDTSPFLILSEASLADLNSRLEKKVKATNFRPNIVISGCDVYAEVTLCPFGSFLGFDFFFKDSWDELLIGDVELKRVMACSRCILTTVDPDTGVMSRKEPLETLKSYRQCDPSERKLYGKSPLFGQYFVLENPGTIKVGDPVYLLGQ

SEQ ID NO: 2458 - protein, 155 aa, Homo sapiens
MWELVALLLLTLAYLFWPKRRCPGAKYPKSLLSLPLVGSLPFLPRHGHMHNNFFKLQKKYGPIYSVRMGTKTTVIVGHHQLAKEVLIKKGKDFSGRPQMELGVGGLRVCPTKSLQSWWSAVGLCPHGSQHARYLPSPPGRKAGTRGVRARVGWMV

SEQ ID NO: 2459 - protein, 116 aa, Homo sapiens
MWWGQIWRLDICHRRNATHIHGFPCVCSSPMPSMKAKVRALTSDEGDTGCADGSIGSAGDNRPGVWSFIVGGHAAYVHSSSHLCSFFSSMSANCPLGPCTLLVLKGPHGSSVMSTI

SEQ ID NO: 2460 - protein, 671 aa, Homo sapiens [sequence omitted]

SEQ ID NO: 2461 - protein, 535 aa, Homo sapiens
MTPESRDTTDLSPGGTQEMEGIVIVKVEEEDEEDHFQKERNKVESSPQVLSRSTTMNERALLSSYLVAYRVAKEKMAHTAAEKIILPACMDMVRTIFDDKSADKLRTIPLSDNTISRRICTIAKHLEAMLITRLQSGIDFAIQLDESTDIASCPTLLVYVRYVWQDDFVEDLLCCLNLNSHITGLDLFTELENCLLGQYKLNWKHCKGISSDGTANMTGKHSRLTEKLLEATHNNAVWNHCFIHREALVSKEISPSLMDVLKNAVKTVNFIKGSSLNSRLLEIFCSEIGVNHTHLLFHTEVRWLSQGKVLSRVYELRNEIYIFLVEKQSLLANIFEDDIWVTKLAYLSDIFGILNELSLKMQGKNNDIFQYLEHILGFQKTLLLWQARLKSNRPSYYMFPTLLQHIEENIINEDCLKEIKLEILLHLTSLSQTFNYYFPEEKFESLKENIWMKDPFAFQNPESIIELNLEPEEENELLQLSSSFTLKNYYKILSLSAFWIKIKDDFPLLSRKSILLLLPFTTTYLCELGFSILTR

SEQ ID NO: 2462 - protein, 134 aa, Homo sapiens [sequence omitted]

SEQ ID NO: 2463 - protein, 132 aa, Homo sapiens
MQTTDLEQTSPPVNQAPNQTKLEVKAPPRWLVLLLGQHSPPFPQPPISPVSLKKPEPCPICTSSVGLSGALGSKERVRSPAPFLPPTLFLTNSWTVPAMRLRTGAMLGCVRDTDHGGQRDTEGDCSATRELT

SEQ ID NO: 2464 - protein, 234 aa, Homo sapiens
MTSVASLPEQSPGYRCRSLTGAGARTSAAGPLARLLPRRRLPPPHLPARPPGGWSRNQSHQRRGPGRCWGWGRGMTRICPLCPGAPEYINSAVSSQTLSQSCTPPQSPQPDPRPLSLRVGLALPGGRLGCGEAGSANRHWFSFLFPFIHFCWSPRAAAPGVAMNGWMPARWDHQVRRDVAGARGAPPAWGQAPSPRRSVGGPQKTLKRPKACSPRSPQHTPGVFSAPEKLGRKT

SEQ ID NO: 2465 - protein, 111 aa, Homo sapiens
MVEGAQPSLAQDVLQGNLWSFALVAHAGVQWHDLSSLQPPLPGFKRFSCLSHPSSWDCRCVPPCLATFVFSVEMGFHLVDQAGLKLLTSGDPPASASQSAGITGESHRARP

SEQ ID NO: 2466 - protein, 118 aa, Homo sapiens
MSIGLKERVPETWGGDRGHGGGGNAGEAVGRGPQAPGGGECGQRPSGSQRREGGSVEQESWTQLWGPRCRGAWSTSLSTRSSCVQATSAQPEAQKSQEVKAMATPGDVRTRRLGTCRP

SEQ ID NO: 2467 - protein, 381 aa, Homo sapiens
MTTCKAGVVPLASQQHPQAHVDIYEKQPVPFGLVRFGVAPDHPEVKNVINTFTQTAHSGRCAFWGNVEVGRDVTVPELQEAYHAVVLSYGAEDHRALEIPGEELPGVCSARAFVGWYNGLPENQELEPDLSCDTAVILGQGNVALDVARILLTPPEHLERTDITKAALGVLRQSRVKTVWLVGRRGPLQVAFTIKELREMIQLPGARPILDPVDFLGLQDKIKEVPRPRKRLTELLLRTATEKPGPAEAARQASASRAWGLRFFRSPQQVLPSPDGRRAAGVRLAVTRLEVSLMFPKDTPFPGLCHPPGVAHTLPNRVSMRPPVQCPRETWKTSLVGWCSAALGIRAALSTQACPLTPSLGSSPMWRAGLWMCQASTAAAG

SEQ ID NO: 2468 - protein, 165 aa, Homo sapiens [sequence omitted]

SEQ ID NO: 2469 - protein, 599 aa, Homo sapiens [sequence omitted]

SEQ ID NO: 2470 - protein, 141 aa, Homo sapiens
MGNCCWTQCFGLLRKEAGRLQRVGGGGGSKYFRTCSRGEHLTIEFENLVESDEGESPGSSHRPLTEEEIVDLRERHYDSIAEKQKDLDKKIQKELALQEEKLRLEEEAGIYFNKGMVGILVNQVILLLARQKLVFFYKLEC

SEQ ID NO: 2471 - protein, 148 aa, Homo sapiens [sequence omitted]

SEQ ID NO: 2472 - protein, 144 aa, Homo sapiens
MHTGEKPFKCKECGKAFNRASHLTQHQRIHTGEKHFKCKECGKAFNRGSHLTRHQRIHTGEKSFKCEECGKAFIWGSHLTQHQRVHTGEKFFKCKECGKAFTRSSHLTQHQRIHTGEKPFKCKECGKAFNRRSTLTQHQIIHTR

SEQ ID NO: 2473 - protein, 165 aa, Homo sapiens
MSQATKRKHVVKEVLGEHIVPSDQQQIVRVLRTPGNNLHEVETAQGQRFLVSMPSKYRKNIWIKRGDFLIVDPIEEGEKVKAEISFVLCKDHVRSLQKEGFWPEAFSEVAEKHNNRNRQTQPELPAEPQLSGEESSSEDDSDLFVNTNRRQYHESEEESEEEEAA

SEQ ID NO: 2474 - protein, 239 aa, Homo sapiens
MGNSALRAHVETAQKTGVFQLKDRGLTEFPADLQKLTSNLRTIDLSNNKIESLPPLLIGKFTLLKSLSLNNNKLTVLPDEICNLKKLETLSLNNNHLRELPSTFGQLSALKTLSLSGNQLGALPPQLCSLRHLDVMDLSKNQIRSIPDSVGELQVIELNLNQNQISQISVKISCCPRLKILRLEENCLELSMLPQSILSDSQICLLAVEGNLFEIKKLRELEGYDKYMERFTATKKKFA

SEQ ID NO: 2475 - protein, 109 aa, Homo sapiens
MPGKGLLFRPGTVTPVITSSGRMPGKGVTLQTWYSHPCDNFIWEGALERVALQTWYSHPCDNFIWEDALERVALQTWYSHPCDNFIREDALETAHSSDLVQSPLLSLDP

SEQ ID NO: 2476 - protein, 291 aa, Homo sapiens [sequence omitted]

SEQ ID NO: 2477 - protein, 663 aa, Homo sapiens
MAGLTAAAPRPGVLLLLLSILHPSRPGGVPGAIPGGVPGGVFYPGAGLGALGGGALGPGGKPLKPVPGGLAGAGLGAGAGLGGVPGVGGLGVSAGAVVPQPGAGVKPGKVPGVGLPGVYPGGVLPGARFPGVGVLPGVPTGAGVKPKAPGVGGAFAGIPGVGPFGGPQPGVPLGYPIKAPKLPGGYGLPYTTGKLPYGYGPGGVAGAAGKAGCPTGTGVGPQAAAAAAAKAAAKFGAGAAGVLPGVGGAGVPGVPGAIPGIGGIAGVGTPAAAAAAAAAAKAAKYGAAAGLVPGGPGFGPGVVGVPGAGVPGVGVPGAGIPVVPGAGIPGAAVPGVVSPEAAAKAAAKAAKYGARPGVGVGGIPTYGVGAGGFPGFGVGVGGIPGVAGVPGVGGVPGVGGVPGVGISPEAQAAAAAKAAKYGVGTPAAAAAKAAAKAAQFGLVPGVGVAPGVGVAPGIGPGGVAAAAKSAAKVAAKAQLRAAAGLGAGIPGLGVGVGVPGLGVGAGVPGLGVGAGVPGFGAVPGALAAAKAAKYGAAVPGVLGGLGALGGVGIPGGVVGAGPAAAAAAAKAAAKAAQFGLVGAAGLGGLGVGGLGVPGVGGLGGIPPAAAAKAAKYGAAGLGGVLGGAGQFPLGGVAARPGFGLSPIFPGGACLGKACGWKRK

SEQ ID NO: 2478 - protein, 309 aa, Homo sapiens [sequence omitted]

SEQ ID NO: 2479 - protein, 424 aa, Homo sapiens
MRTYVCHICSIAFTSLDMFRSHMQGSEHQIKESIVINLVKNSRKTQDSYQNECADYINVQKARGLEAKTCFRKMEESSLETRRYREVVDSRPRHRMFEQRLPFETFRTYAAPYNISQAMEKQLPHSKKTYDSFQDELEDYIKVQKARGLDPKTCFRKMRENSVDTHGYREMVDSGPRSRMCEQRFSHEASQTYQRPYHISPVESQLPQWLPTHSKRTYDSFQDELEDYIKVQKARGLEPKTCFRKIGDSSVETHRNREMVDVRPRHRMLEQKLPCETFQTYSGPYSISQVVENQLPHCLPAHDSKQRLDSISYCQLTRDCFPEKPVPLSLNQQENNSGSYSVESEVYKHLSSENNTADHQAGHKRKHQKRKRHLEEGKERPEKEQSKHKRKKSYEDTDLDKDKSIRQRKREEDRVKVSSGKLKH

SEQ ID NO: 2480 - protein, 531 aa, Homo sapiens
MSRPEAVQEATEVTLKTEVEAGASGYSVTGGGDQGIFVKQVLKDSSAAKLFNLREGDQLLSTTVFFENIKYEDALKILQYSEPYKVQFKIRRQLPAPQDEEWASSDAQHGPQGKEKEDTDVADGCRETPTKTLEGDGDQERLISKPRVGRGRQSQRERLSWPKFQSIKSKRGPGPQRSHSSSEAYEPRDAHDVSPTSTDTEAQLTVERQEQKAGPGSQRRRKFLNLRFRTGSGQGPSSTGQPGRGFQSGVGRAGVLEELGPWGDSLEETGAATGSRREERAEQDREVMPAQSMPLPTELGDPRLCEGTPQEGGLRAARLHGKTLEGQAQETAVAQRKPRAQPTPGMSREGEGEGLQSLEIGIARLSLRDTTEGGTQIGPPEIRVRVHDLKTPKFAFSTEKEPERERRLSTPQRGKRQDASSKAGTGLKGEEVEGAGWMPGREPTTHAEAQGDEGDGEEGLQRTRITEEQDKGREDTEGQIRMPKFKIPSLGWSPSKHTKTGREKATEDTEQGREGEATATADRREQRRTEE

SEQ ID NO: 2481 - protein, 448 aa, Homo sapiens [sequence omitted]

SEQ ID NO: 2482 - protein, 106 aa, Homo sapiens
MTHTVPPNHKGARKSNPTICLERRKPNTLCYLFISPCLFSLLSASGTSLRPSECIFIPLSFSHVFQSFGILMIPPERCPQLFLPHYQFGLPICPSSYSTCLFNIFS

SEQ ID NO: 2483 - protein, 387 aa, Homo sapiens [sequence omitted]

SEQ ID NO: 2484 - protein, 557 aa, Homo sapiens [sequence omitted]

SEQ ID NO: 2485 - protein, 582 aa, Homo sapiens
MQERPVSGSRAGLPSVLPARSVDGSSKQSPGEARRAAVPLVRRRLVLGGHVRARAWPSPTSSSPVCVLPDSAVVMEEGSPGEVPVLVEPPGLEDVEAALGMDRRTDAYSRSSSVSSQEEKSLHAEELVGRGIPIERVVSSEGGRPSVDLSFQPSQPLSKSSSSPELQTLQDILGDPGDKADVGRLSPEVKARSQSGTLDGESAAWSASGEDSRGQPEGPLPSSSPRSPSGLRPRGYTISDSAPSRRGKRVERDALKSRATASNAEKVPGINPSFVFLQLYHSPFFGDESNKPILLPNESQSFERSVQLLDQIPSYDTHKIAVLYVGEGQSNSELAILSNEHGSYRYTEFLTGLGRLIELKDCQPDKVYLGGLDVCGEDGQFTYCWHDDIMQAVFHIATLMPTKDVDKHRCDKKRHLGNDFVSIVYNDSGEDFKLGTIKGQFNFVHVIVTPLDYECNLVSLQCRKDMEGLVDTSVAKIVSDRNLPFVARQMALHANMASQVHHSRSNPTDIYPSKWIARLRHIKRLRQRICEEAAYSNPSLPLVHPPSHSKAPAQTPAEPTPGYEVGQRKRLISSVEDFTEFV

SEQ ID NO: 2486 - protein, 134 aa, Homo sapiens [sequence omitted]

SEQ ID NO: 2487 - protein, 545 aa, Homo sapiens
MTDVTKSQPHCELNSFVLTGHSPVLWMMSEHDLADVVQIAVEDLSPDHPVVLENHVVTDEDEPALKRQRLEINCQDPSIKTICLRLDSIEAKLQALEATCKSLEEKLDLVTNKQHSPIQVPMVAGSPLGATQTCNKVRCVVPQTTVILNNDRQNAIVAKMEDPLSNRAPDSLENVISNAVPGRRQNTIVVKVPGQEDSHHEDGESGSEASDSVSSCGQAGSQSIGSNVTLITLNSEEDYPNGTWLGDENNPEMRVRCAIIPSDMLHISTNCRTAEKMALTLLDYLFHREVQAVSNLSGQGKHGKKQLDPLTIYGIRCHLFYKFGITESDWYRIKQSIDSKCRTAWRRKQRGQSLAVKSFSRRTPNSSSYCPSEPMMSTPPPASELPQPQPQPQALHYALANAQQVQIHQIGEDGQVQVGHLHIAQVPQGEQVQITQDSEGNLQIHHVGQDGQLLEATRIPCLLAPSVFKASSGQVLQGAQLIAVASSDPAAAGVDGSPLQGSDIQVQYVQLAPVSDHTAGAQTAEALQPTLQPEMQLEHGAIQIQ

SEQ ID NO: 2488 - protein, 126 aa, Homo sapiens
MGSTEQVVAEGGVSCETIFKIRALGPLCCNQLAQERTPGCPELYTYCTGCERRPENPWVPNPPHSKLSSSIENSDTKFSRSICLCSFTFNFSLHYNWETEAPEEAETGPDLRRWAGSRALERAPAS

SEQ ID NO: 2489 - protein, 260 aa, Homo sapiens
MGLLDLCEEVFGTADLYRVLGVRREASDGEVRRGYHKVSLQVHPDRVGEGDKEDATRRFQILGKVYSVLSDREQRAVYDEQGTVDEDSPVLTQDRDWEAYWRLLFKKISLEDIQAFEKTYKGSEEELADIKQAYLDFKGDMDQIMESVLCVQYTEEPRIRNIIQQAIDAGEVPSYNAFVKESKQKMNARKRRAQEEAKEAEMSRKELGLDEGVDSLKAAIQSRQKDRQKEMDNFLAQMEAKYCKSSKGGGKKSALKKEKK

SEQ ID NO: 2490 - protein, 800 aa, Homo sapiens
MTGLNGSIQQITVISPFSFSIGDTTELEPYLHGGIAVQVKTPKTVFFESLERQLKHPKCLIVDFSNPEAPLEIHTAMLALDQFQEKYSRKPNVGCQQDSEELLKLATSISETLEEKPDVNADIVHWLSWTAQGFLSPLAAAVGGVASQEVLKAVTGKFSPLCQWLYLEAADIVESLGKPECEEFLPRGDRYDALRACIGDTLCQKLQNLNIFLVGCGAIGCEMLKNFALLGVGTSKEKGMITVTDPDLIEKSNLNRQFLFRPHHIQKPKSYTAADATLKINSQIKIDAHLNKVCPTTETIYNDEFYTKQDVIITALDNVEARRYVDSRCLANLRPLLDSGTMGTKGHTEVIVPHLTESYNSHRDPPEEEIPFCTLKSFPAAIEHTIQWARDKFESSFSHKPSLFNKFWQTYSSAEEVLQKIQSGHSLEGCFQVIKLLSRRPRNWSQCVELARLKFEKYFNHKALQLLHCFPLDIRLKDGSLFWQSPKRPPSPIKFDLNEPLHLSFLQNAAKLYATVYCIPFAEEDLSADALLNILSEVKIQEFKPSNKVVQTDETARKPDHVPISSEDERNAIFQLEKAILSNEATKSDLQMAVLSFEKDDDHNGHIDFITAASNLRAKMYSIEPADRFKTKRIAGKIIPAIATTTATVSGLVALEMIKVTGGYPFEAYKNCFLNLAIPIVVFTETTEVRKTKIRNGISFTIWDRWTVHGKEDFTLLDFINAVKEKYGIEPTMVVQGVKMLYVPVMPGHAKRLKLTMHKLVKPTTEKKYVDLTVSFAPDIDGDEDLPGPPVRYYFSHDTD

SEQ ID NO: 2491 - protein, 112 aa, Homo sapiens [sequence omitted]

SEQ ID NO: 2492 - protein, 236 aa, Homo sapiens
MKEADLQRLFHRPQVPTPSRAVLQEALAGRAPSCPLPAPPSRPQTPPPKTPVNSGSRPSRGRGGGRGRQAGAVQPFSPAINILGLGGAANSTLWLADRSGPQLPAFPPRAVKPGRSFFSVGAEGYAAPPPQRTLRGHRLEADPCTGAGVPREGTDPSRTYSRPACPALLRSPNSASETTQRASESGKHTHPGGRRKPNPAPPQAASETHLPLPLAAGKLGAFMAPREEGSQAESHL

SEQ ID NO: 2493 - protein, 457 aa, Homo sapiens [sequence omitted]

SEQ ID NO: 2494 - protein, 400 aa, Homo sapiens
MEVLRPQLIRIDGRNYRKNPVQEQTYQHEEDEEDFYQGSMECADEPCDAYEVEQTPQGFRSTLRAPSLLYNLIHLNTSNDCGFQKITLDCQNIYTWKSRHIVGKRGDTRKKIEMETKTSISIPKPGQDGEIVITGQHRNGVISARTRIDVLLDTFRRKQPFTHFLAFFLNEVEVQEGFLRFQEEVLAKCSMDHGVDSSIFQNPKKLHLTIGMLVLLSEEEIQQTCEMLQQCKEEFINDISGGKPLEVEMAGIEYMNDDPGMVDVLYAKVHMKDGSNRLQELVDRVLERFQASGLIVKEWNSVKLHATVMNTLFRKDPNAEGRYNLYTAEGKYIFKERESFDGRNILKSFALLPRLEYNDAISAHCNLCLPGSSDSPASASQVAGITGVSDAYSQSLPGKS

SEQ ID NO: 2495 - protein, 553 aa, Homo sapiens
MIKSRPLDYTFVPRTWIFPAEYTQFQNYVKELKKKRKQKTFIVKPANGAMGHGISLIRNGDKLPSQDHLIVQEYIEKPFLMEGYKFDLRIYILVTSCDPLKIFLYHDGLVRMGTEKYIPPNESNLTQLYMHLTNYSVNKHNEHFERDETENKGSKRSIKWFTEFLQANQHDVAKFWSDISELVVKTLIVAEPHVLHAYRMCRPGQPPGSESVCFEVLGFDILLDRKLKPWLLEINRAPSFGTDQKIDYDVKRGVLLNALKLLNIRTSDKRRNLAKQKAEAQRRLYGQNSIKRLLPGSSDWEQQRHQLERRKEELKERLAQVRKQISREEHENRHMGNYRRIYPPEDKALLEKYENLLAVAFQTFLSGRAASFQRELNNPLKRMKEEDILDLLEQCEIDDEKLMGKTTKTRGPKPLCSMPESTEIMKRPKYCSSDSSYDSSSSSSESDENEKEEYQNKKREKQVTYNLKPSNHYKLIQQPSSIRRSVSCPRSISAQSPSSGDTRPFSAQQMISVSRPTSASRSHSLNRASSYMRHLPHSNDACSTNSQVIILAQ

SEQ ID NO: 2496 - protein, 157 aa, Homo sapiens
MLTPWIVNPHPPNGDSEGGLLAPALRCSSDPSPQRADVPTRSCSHPQVGHVGFLLCGPGRPFMSGTQDITDFNPEDRAPAPCLGPWGVEQWLGWAWCGLRDCLAGEAFLYKATRAAVPSRPRLAKTSTSPESSPGNSKGPGVLCLPRFPVSVCKTLA

SEQ ID NO: 2497 - protein, 696 aa, Homo sapiens [sequence omitted]

SEQ ID NO: 2498 - protein, 124 aa, Homo sapiens [sequence omitted]

SEQ ID NO: 2499 - protein, 331 aa, Homo sapiens
MRRKTRNFKHKTVKDNKVLTEGSDQESEKDNSQCCDPATNERVQAEKRQYVCTECGNAFSQSANLTVHERIHTGEKPYKCKECGKAFSHSSNLVVHRRIHTGLKPYTCSECGKSFSGKSHLIRHQGIHSGEKTYECKECGKAFSRSSGLISHHRVHTGEKPYSCIECGKAFSRSSNLTQHQRMHRGKKVYKCKECGKTCGSNTKIMDHQRIHTGEKPYECDECGKTFILRKTLNEHQRLHRREKPYKCNECGKAFTSNRNLVDHQRVHTGEKPYKCNECGKTFRQTSQVILHLRTHTKEKPYKCSECGKAYRYSSQLIQHQRKHNEEKETS

SEQ ID NO: 2500 - protein, 201 aa, Homo sapiens
MENGFTMCQTGRQHPVACGLHLSGGKEDLNDLRMEGVTTLVPSGSKFNQGRPTYPAEPQAKVTLNICSRCARLQGDNLEERTEESLPILHSPDEKIPDSFDSLPGTEEALMEEGDEFEKASKLTGPGEASSGVGHSLKNYMEEDESLKQLQVVHQPWILPSDTESEGVEAEQEKHLLNQNLCGWDSEFCIFHTLASFLIYK

SEQ ID NO: 2501 - protein, 627 aa, Homo sapiens
MPTVSVLEYALPQRPPQGPEDDRDLSERALPRRSTSPIIGSPPVRAVPIGTPPKQMAVPSFTQQILCPKPVHVRPPMPPRYPAPYGERMSPNQLCSVPNSSLLGHPFPPSVPPVLSPLQRAQLLGGAQLQPGRMSPSQFARVPGFVGSPLAAMNPKLLQGRVGQMLPPAPGFRAFFSAPPSATPPPQQHPPGPGPHLQNLRSQAPMFRPDTTHLHPQHRRLLHQRQQQNRSQHRNLNGAGDRGSHRSSHQDHLRKDPYANLMLQREKDWVSKIQMMQLQSTDPYLDDFYYQNYFEKLEKLSAAEEIQGDGPKKERTKLITPQVAKLEHAYKPVQFEGSLGKLTVSSVNNPRKMIDAVVTSRSEDDETKEKQVRDKRRKTLVIIEKTYSLLLDVEDYERRYLLSLEEERPALMDDRKHKICSMYDNLRGKLPGQERPSDDHFVQIMCIRKGKRMVARILPFLSTEQAADILMTTARNLPFLIKKDAQDEVLPCLLSPFSLLLYHLPSVSITSLLRQLMNLPQSAATPALSNPHLTAVLQNKFGLSLLLILLSRGEDLQSSDPATESTQNNQWTEVMFMATRELLRIPQAALAKPISIPTNLVSLFSRYVDRQKLNLLETKLQLVQGIR

SEQ ID NO: 2502 - protein, 126 aa, Homo sapiens [sequence omitted]

SEQ ID NO: 2503 - protein, 163 aa, Homo sapiens
MVDVSFRPLKVSDCPLTFPISGRGKTSESTWLHQCRFSLYIASLSHTHTHTHTHTHTHTHTKQLRRTTSACRSSEQPYLKICERSIFWGKIFWFPSLHISPWVLFLPLVSCSQTHEAEKQLGMQNLMCFILCGLEESLVPKIIPWGPLLHRQIKAKRSLLSLK

SEQ ID NO: 2504 - protein, 508 aa, Homo sapiens
MASAVWGSAPWWGPPPPAPARPLTDIDFCSGAQLQELTQLIQELGVQESWSDGPKPGADLLRAKDFVFSLLGLVHRRDPRFPPQAELLLLRGGIREGSLDLGHAPLGPYARGPHYDAGFTLLVPMFSLDGTELQLDLESCYAQVCLPEMVCGTPIREMWQDCLGPPVPGARDSIHRTESEESSKDWQSSVDQPHSYVTEHEAPVSLEKSPSDVSASESPQHDVVDLGSTAPLKTMSSDVTKAAVESPVPKPSEAREAWPTLCSAQVAAWFFATLAAVAESLIPVPGAPRLVHAARHAGFTTVLLATPEPPRRLLLFDLIPVVSVAGWPEGARSHSWAGPLASESASFYLVPGGGTERPCASAWQLCFARQELALKARIPAPLLQAHAAAQALLRPLVAGTRAAAPYLLRTLLYWACERLPALYLARPENAGACCLGLLDELGRVLEAGTLPHYFLNGRQLRTGDDSAALLGELARLRGDPARALRAAVEEAKVARKGGGLAGVGGGAH

SEQ ID NO: 2505 - protein, 408 aa, Homo sapiens [sequence omitted]

SEQ ID NO: 2506 - protein, 224 aa, Homo sapiens
MGIMAASRPLSRFWEWGKNIVCVGRNYADHVREMRSAVLSEPVLFLKPSTAYAPEGSPILMPAYTRNLHHELELGVVMGKRCRAVPEAAAMDYVGGYALCLDMTARDVQDECKKKGLPWTLAKSFTASCPVSAFVPKEKIPDPHKLKLWLKVNGELRQEGETSSMIFSIPYIISYVSKIITLEEGDIILTGTPKGVGPVKENDEIEAGIHGLVSMTFKVEKPEY

SEQ ID NO: 2507 - protein, 601 aa, Homo sapiens
MNESAPGTYVVQNPHSSELPTLNFQDTVNTLTNSPAIPLETSACQDIPTSANVQNAEGTKWGEEALKMDLDNNFYSTEVSVSSTENAVSSDLRAGDVPVLSLSNSSENAASVISYSGSAPSVIVHSSQFSSVIMHSNAIAAMTSSNHRAFSDPAVSQSLKDDSKPEPDKVGRFASRPKSIKEKKKTTSHTRGEIPEESNYVADPGGSLSKTTNIAEETSKIETYIAKPALPGTSTNSNVAPLCQITVKIGNEAIVKRHILGSKLFYKRGRRPKYQMQEEPLPQGNDPEPSGDSPLGLCQSECMEMSEVFDDASDQDSTDKPWRPYYNYKPKKKSRQLKKMRKVNWRKEHGNRSPSHKCKYPAELDCAVGKAPQDKPFEEEETKEMPKLQCELCDGDKAVGAGNQGRPHRHLTSRPYACELCAKQFQSPSTLKMHMRCHTGEKPYQCKTCGRCFSVQGNLQKHERIHLGLKEFVCQYCNKAFTLNETLKIHERIHTGEKRYHCQFCFQRFLYLSTKRNHEQRHIREHNGKGYACFQCPKICKTAAALGMHQKKHLFKSPSQQEKIGDVCHENSNPLENQHFIGSEDNDQKDNIQTGVENVVL

SEQ ID NO: 2508 - protein, 616 aa, Homo sapiens
MLDTFRLLVSVGHWLPKPNVISLLEQEAELWAVESRLPQGVYPDLETRPKVKLSVLKQGISEEISNSVILVERFLWDGLWYCRGEDTEGHWEWSCESLESLAVPVAFTPVKTPVLEQWQRNGFGENISLNPDLPHQPMTPERQSPHTWGTRGKREKPDLNVLQKTCVKEKPYKCQECGKAFSHSSALIEHHRTHTGERPYECHECLKGFRNSSALTKHQRIHTGEKPYKCTQCGRTFNQIAPLIQHQRTHTGEKPYECSECGKSFSFRSSFSQHERTHTGEKPYECSECGKAFRQSIHLTQHLRIHTGEKPYQCGECGKAFSHSSSLTKHQRIHTGEKPYECHECGKAFTQITPLIQHQRTHTGEKPYECGECGKAFSQSTLLTEHRRIHTGEKPYGCNECGKTFSHSSSLSQHERTHTGEKPYECSQCGKAFRQSTHLTQHQRIHTGEKPYECNDCGKAFSHSSSLTKHQRIHTGEKPYECNQCGRAFSQLAPLIQHQRIHTGEKPYECNQCGRAFSQSSLLIEHQRIHTKEKPYGCNECGKSFSHSSSLSQHERTHTGEKPYECHDCGKSFRQSTHLTQHRRIHTGEKPYACRDCGKAFTHSSSLTKHQRTHTG

SEQ ID NO: 2509 - protein, 115 aa, Homo sapiens
MSRIPLGKVLLRNVIRHTDAHNKIQEESDMWKIRELEKQMEDAYRGTKRKMLPSSSSRMRSDGFDEESQRYYWRPKNEISGTLEDDFLKAKSWNKKFYDYEANMPDRFVINSCEH

SEQ ID NO: 2510 - protein, 422 aa, Homo sapiens
MVMAALSLVAACWGRAAADESVQLPAAPGSSVRARETMVSVTMATSEWIQFFKEAGIPPGPAVNYAVMFVDNRIQKSMLLDLNKEIMNELGVTVVGDIIAILKHAKVVHRQDMCKAATESVPCSPSPLAGEIRRGTSAASRMITNSLNHDSPPSTPPRRPDTSTSKISVTVSNKMAAKSAKATAALARREEESLAVPAKRRRVTAEMEGKYVINMPKGTTPRTRKILEQQQAAKGLHRTSVFDRLGAETKADTTTGSKPTGVFSRLGATPETDEDLAWDSDNDSSSSVLQYAGVLKKLGRGPAKASPQPALTVKAKATSSATTAAAPTLRRLALSSRSGLERKPESLSKVSIIKRLGAAALVPEAQDSQVTSTKSKSSAEVKVTIKRTLVGPRGSSSSEGLGAQMDHAGTVSVFKRLGRRTF

SEQ ID NO: 2511 - protein, 417 aa, Homo sapiens
MASSKLREPVDEVFDLDLAVPETARLDSSLHKARAQLLAKGRRHRPSRSRLRDSASSAEDGEGSDGPGGKVTDGCGSPLHRLRSPLHSGPGSPAGGSFCLDPPGLRRSLDEDEPPPSPLTRYRPLHNAASHEGLAAASCSPPRSAPSSDSSPSFVRRHPRAEPHSEDDSRDASPPEPASPTIGLDKKTRRKFLDLGVTLRRASTGKSRKEKGSNRLSMGSRESVEGSGRSGGSPFLPFSWFTDSGKGSASSGSTTSPTCSPKHEGFSPKKSASQESTLSDDSTPPSSSPKIPSGPWQEAKCSYPYHTLSQSSDEFLDEPLPPVHHWTSQQVGQWLQSLNLEQYAAEFAARQVDGPQLLQLDGSKLKSLGLSNSHDRALVKRKLKEMAAAAEKERKAQEKAARQREKLRRREQEAKKS

SEQ ID NO: 2512 - protein, 110 aa, Homo sapiens [sequence omitted]

SEQ ID NO: 2513 - protein, 510 aa, Homo sapiens
MATGRGRILQQHWLGLQTLRGPSRGGGAARGRARAFGCRKGPGVKLSAGSAALRCHAGGGQHWESSFSCCSGFLDGMPSEILLKIFSYLDAVSLLCTGCVSRRFYHLANDNFIWIGIYSTAFSPARSNWKFNSVEKIAMSMSFLSVQDKEAGYWKKEYITKQIASVKAALADILKPVNPYTGLPVKTKEALRIFGLGWAIILKEKGGKEYIMEHVDLSINDTSVTVIWYGKKWPCLASLSTLDLCGMTPVFTDWYKTPTKHRLRWHSLIAKYNLSHLTISTMIGCDRLIRIFCLHPGLLVGVWKKEEELAFVMANLHFHHLVERSTLGSATIPYELPPHSPFLDDSPEYGLHGYQLHVDLHSGGVFYLCGTFRNLFTKRGNIENGHVKLIVIHLKNNREHLPLIGKVGLSWKTDIFDGCIKSCSMMDVTLLDEHGKPFWCFSSPVCLRSPATPSDSSSFLGQTYNVDYVDAEGRVHVELVWIRETEEYLIVNLVLYLSIAKINHWFGTEY

SEQ ID NO: 2514 - protein, 151 aa, Homo sapiens
MAPVASETLVPGPLLYPFVHSSHAGLLAASGTLHAPRSILPWGPGCDLCLTCSFLCSPLPPGHLGPSSNVMMGRDTLAKGLPVTLRHIVMLSLEEMGSCCVAQAGFELLCSSDPPASTSLVAGTTCLCHHTSHTRNVVISFLLDLWVPLRM

SEQ ID NO: 2515 - protein, 421 aa, Homo sapiens
MSATLILEPPGRCCWNEPVRIAVRGLAPEQRVTLRASLRDEKGALFRAHARYCADARGELDLERAPALGGSFAGLEPMGLLWALEPEKPFWRFLKRDVQIPFVVELEVLDGHDPEPGRLLCQAQHERHFPPPGVRRQSVRAGRVRATLFLPPGPGPFPGIIDIFGIGGGLLEYRASLLAGHGFATLDLQSYNFEDLPNNMDNISLEYFEEAVCYMLQHPQVKGPGIGLLGISLGADICLSMASFLKNVSATVSINGSGISGNTAINYKHSSIPPLGYDLRRIKVAFSGLVDIVDIRNALVGGYKNPSMIPIEKAQGPILLIVGQDDHNWRSELYAQTVSERLQAHGKEKPQIICYPGTGHYIEPPYFPLCPASLHRLLNKHVIWGGEPRAHSKAQEDAWKQILAFFCKHLGGTQKTAVPKL

SEQ ID NO: 2516 - protein, 108 aa, Homo sapiens
MPAAFPCVFPPQSLQVFPQMIVKVWEKQSLPLPGLRGSPVERLYLPRNELDNPHKQKAWKIYPPEFAVEILFGGFSLCHPGWSVVAQSLLTSTSAFCVRAILLPQPPE

SEQ ID NO: 2517 - protein, 513 aa, Homo sapiens [sequence omitted]

SEQ ID NO: 2518 - protein, 114 aa, Homo sapiens
MAAAAAGPGLGGSLGGALAGPLGGALGVPGAKESRAFNCHVEYEKTNRARKHRPCLYDPSQVCFTEHTQSQAAWLCAKPFKVICIFVSFLSFDYKLVQKVCPDYNFQSEHPYFG

SEQ ID NO: 2519 - protein, 262 aa, Homo sapiens
MGDLGPLGAGHKEHRAWCMTCSRIQRLNGWWCVTLGKEIRPYAFSVSLPSFSTCTLDPLESTMRSQHAGLVLVDRGCLTLPLFQILIQIVDASSVITWDFDVCKGDIVFNIYHSKRSPQPPKKDSLGAHSITSPGGNNVQLIDKVWQLGRDYSMVESPLICKEGESVQGSHVTRWPGFYILQWKFHSMPACAASSLPRVDDVLASLQVSSHKCKVMYYTEVIGSEDFRGSMTSLESSHSGFSQLSAATTSSSQSHSSSMISR

SEQ ID NO: 2520 - protein, 104 aa, Homo sapiens [sequence omitted]

SEQ ID NO: 2521 - protein, 132 aa, Homo sapiens
MQVIHGPHVEKLQSPLGPHRPSPRCPLSVVTGPDLQECTFHSTRKPYDILRLPRPAACMGPLPSSTPTLRMVPCSALVLCWPLPATPTLRHPGVVGPNWLAPPSAALCRPDAAVWPDLPSSNILLVTPPPAK

SEQ ID NO: 2522 - protein, 193 aa, Homo sapiens
MVATGSLSSKNPASISELLDCGYHPESLLSDFDYWDYVVPEPNLNEVIFEESTCQNLVKMLENCLSKSKQTKLGCSKVLVPEKLTQRIAQDVLRLSSTEPCGLRGCVMHVNLEIENVCKKLDRIVCDSSVVPTFELTLVFKQENCSWTSFRDFFFSRGRFSSGFRRTLILSSGFRLVKKKLYSLIGTTVIEGS

SEQ ID NO: 2523 - protein, 250 aa, Homo sapiens
MGQRDQGLDRERKGPQDDPGSYQGPERRNFLKEDAMKTKTHYHAMHADCLQELRRYLKSGVVLRRTVPPMVNVTRSEASEGNITVTCRASGFYPWNITLSWRQDGVSLSHDTQQWGDVLPDGNGTYQTWVATRICQGEEQRFTCYMEHSGNHSTHPVPSGKVLVLQSHWQTFHVSAVAAAAAAAAAIFVIIIFYVCCCKKKTSAAEGPELVSLQVLDQHPVGTSDHRDATQLGFQPLMSDLGSTGSTEGA

SEQ ID NO: 2524 - protein, 557 aa, Homo sapiens [sequence omitted]

SEQ ID NO: 2525 - protein, 116 aa, Homo sapiens [sequence omitted]

SEQ ID NO: 2526 - protein, 120 aa, Homo sapiens
MTMTMSYKAIEKIPRCSWNREEPGEQWNKIYSVETGLLGTYSFEWQSQVANKTMRKRNTNSICGRQHEPHCPVSITRAIAQPQLLTFPDSLASRGGHMTQSGQCHVSGSLLGRGHKSRGR

SEQ ID NO: 2527 - protein, 334 aa, Homo sapiens
MLRNGAPLTRLPSDKLKAVIPPFLPPSSFELWSSDRSRTRHNGKADPMKTALPQRASRGHPVGGGGTDTTPVRPVKFPSLPRSPASSANSGNFNHSPHSSGGSSGIGVGRHGGELLNRSGGSIDNVLSQIAAQRKKAAGLLEQKPSHRSSPVGPAPGSSPSELPASPAGGSAPVGKQKLETSKRPPSGTSTTSKSTSPTLTPSPSPKGHTAESSVSSSSSHRQSKSSGGSSSGTITDEDELTGILKKLSLEKYQPIFEEQEVDMEAFLTLTDGDLKELGIKTDGSRQQILAAISELNAGKGRERQILQETIHNFHSSFESSASNTRAPGNSPCA

SEQ ID NO: 2528 - protein, 262 aa, Homo sapiens
MSPNSPLHCSYLPAVSVLDSADIEVTDSRLPHATIVDHRPQGKARSAPKPSQASGHFSVELVRGYAGFGLTLGGGRDVAGDTPLAVRGLLKDGPAQRCGRLEVGDLVLHINGESTQGLTHAQAVERIRAGGPQLHLVIRRPLETHPGKPRGVGEPRKGVDRSPDPGGPEVTGSRSSSTSLVQHPPSRTTLKKTRGSPEPSPEAAADGPTVSPPERRAEDPNDQIPGSPGPWLVPSEERLSRALGVRGAAQLAQEMAAGRRRH

SEQ ID NO: 2529 - protein, 283 aa, Homo sapiens
MAVQESAAQLSMTLKVQEYPTLKVPYETLNKRFRAAQKNIDRETSHVTMVVAELEKTLSGIEDLVNIEMFLTAKEVESIQAEDESAKLCKRRIEHLKEHSSDQPAAASVWKRKRMDRMMVEHLLRCGYYNTAVKLARQSGIKDLLDPARWRMLIQQFRYDNYRLHQLGNNSVFTLTLQAGLSAIKTPQCYKEDGSSKSPDCPVCSRSLNKLAQPLPMAHCANSRLVCKISGDVMNENNPPMMLPNGYVYGYNSLLSIRQDDKVVCPRTKEVFHFSQAEKVYIM

SEQ ID NO: 2530 - protein, 289 aa, Homo sapiens [sequence omitted]

SEQ ID NO: 2531 - protein, 101 aa, Homo sapiens [sequence omitted]

SEQ ID NO: 2532 - protein, 166 aa, Homo sapiens
MLECSGVILAHCNLRLLDSGDSRASASRVAGITDLHHHARLVFVSLVEMGFRRVGRAGLELPTSSDPPTSASQSAGIAGVSHRARPAVVLSHQQSHLQLLQTLQQKAKWHWIPSGVGLCEGSCRHQLPANTCSPADSLAPVSGGLGDTLGRWSRGHMGMVRVGGGL

SEQ ID NO: 2533 - protein, 200 aa, Homo sapiens
MLGPRQGLSQKQGPGRGRLACPRSPCSHWPQFAFCRFSILVGSAFISETDMCLLCPFPIGKAISVRLQYFKHKTKQSICLGNQKSPLVCPFFGEQGLDSSSSLDLPSSPHHAPTLCPCVQPPRGPVSVSVPVSVMGSRLAPLLSACLFVSVILGRMVILKNPGVLGQRQAGPSPGAPGLPSPSVRAPLGHKCSERSPSAT

SEQ ID NO: 2534 - protein, 214 aa, Homo sapiens
MNLSSASSTEEKAVTTVLWGCELSQERRTWTFRPQLEGKQSCRLLLHTICLGEKAKEEMHRVEILPPANQEDKKMQPVTIASLQASVLPMVSMVGVQLSPPVTFQLRAGSGPVFLSGQERYEASDLTWEEEEEEEGEEEEEEEEDDEDEDADISLEEQSPVKQVKRLVPQKQASVAKKKKLEKEEEEIRASVRDKSPVKKAKATARAKKPGFKK

SEQ ID NO: 2535 - protein, 105 aa, Homo sapiens [sequence omitted]

SEQ ID NO: 2536 - protein, 120 aa, Homo sapiens
MGSGALSRLYSHIQLASKLSSGCDYALFKDGIQPMWEDSRNKRGGRWLVSLAKQQRHIELDRLWLETVSWRRRVLRGRDGLCGSHGGSGLKDGRPVPMSQPVISQPPTSGPAAVSDRGEL

SEQ ID NO: 2537 - protein, 257 aa, Homo sapiens
MAVINGCQMSVPPNRTEAMWEDFITCLKDQDLIFSAAFEAQSCYLLTKTAVSRPLFLVLDDNFYYQSMRYEVYQLARKYSLGFCQLFLDCPLETCLQRNGQRPQALPPETIHLMRRKLEKPNPEKNAWEHNSLTIPSPACASEASLEVTDLLLTALENPVKYAEDNMEQKDTDRIICSTNILHKTDQTLRRIVSQTMKEAKGNQEAFSEMTFKQRWVRANHAAIWRIILGNEHIKCRSAKVGWLQCCRIEKRPLSTG

SEQ ID NO: 2538 - protein, 394 aa, Homo sapiens
MRSAAKPWNPAIRAGGHGPDRVRPLPAASSGMKSSKSSTSLAFESRLSRLKRASSEDTLNKPGSTAASGVVRLKKTATAGAISELTESRLRSGTGAFTTTKRTGIPAPREISVTVSRERSVPRGPSNPRKSVSSPTSSNTPTPTKHLRTPSTKPKQENEGGEKAALESQVRELLAEAKAKDSEINRLRSELKKYKEKRTLNAEGTDALGPNVDGTSVSSGDTEPMIRALEEKNKNFQKELSDLEEENRVLKEKLIYLEHSPNSEGAASHTGDSSCPTSITQESSFGSPTGNQMSSDIDEYKKNIHGNALRTSGSSSSDVTKASLSPDASDFEHITAETPSRPLSSTSNPFKSSKCSTAGSSPNSVSELSLASLTEKIQKMEENHHSTAEVHRYS

SEQ ID NO: 2539 - protein, 101 aa, Homo sapiens
MFFGMESCSVPHAGVQWHNLSSLQPPPSGFKPFSYLSLLSSRDQRRPLPCLVTFVFLIETRFRHVGQAGLKLLTSGDPPASASQSAGIRGVSHCAWPECQI

SEQ ID NO: 2540 - protein, 460 aa, Homo sapiens
MKTHPPYTMCFRVKFYPHEPLKIKEELTRYLLYLQIKRDIFHGRLLCSFSDAAYLGACIVQAELGDYDPDEHPENYISEFEIFPKQSQKLERKIVEIHKNELRGQSPPVAEFNLLLKAHTLETYGVDPHPCKDSTGTTTFLGFTAAGFVVFQGNKRIHLIKWPDVCKLKFEGKTFYVIGTQKEKKAMLAFHTSTPAACKHLWKCGVENQAFYKYAKSSQIKTVSSSKIFFKGSRFRYSGKVAKEVVEASSKIQREPPEVHRANITQSRSSHSLNKQLIINMEPLQPLLPSPSEQEEELPLGEGVPLPKEENISAPLISSSPVKAAREYEDPPSEEEDKIKEEPLTISELVYNPSASLLPTPVDDDEIDMLFDCPSRLELEREDTDSFEDLEADENAFLIAEEEELKEARRALSWSYDILTGHIRVNPLVKSFSRLLVVGLGLLLFVFPLLLLLLESVSMQ

SEQ ID NO: 2541 - protein, 496 aa, Homo sapiens
MLHTEGHALLRAVGQGKLRLARLLLEGGAYVNEGDAQGETALMAACRARYDDPQNKARMVRYLLEQGADPNIADRLGRTALMHACAGGGGAAVASLLLAHGADPSVRDHAGASALVHALDRGDRETLATLLDACKAKGTEVIIITTDTSPSGTKKTRQYLNSPPSPGVEDPAPASPSPGFCTSPSEIQLQTAGGGGRGMLSPRAQEEEEKRDVFEFPLPKPPDDPSPSEPLPKPPRHPPKPLKRLNSEPWGLVAPPQPVPPTEGRPGIERLTAEFNGLTLTGRPRLSRRHSTEGPEDPPPWAEKVTSGGPLSRRNTAPEAQESGPPSGLRQKLSRMEPVELDTPGHLCPDSPESSRLSLERRRYSASPLTLPPAGSAPSPRQSQESLPGAVSPLSGRRRSPGLLERRGSGTLLLDHISQTRPGFLPPLNVSPHPPIPDIRPQPGGRAPSLPAPPYAGAPGSPRTKRKLVRRHSMQTEQIRLLGGFQSLGGPGEPGR

SEQ ID NO: 2542 - protein, 132 aa, Homo sapiens
MKRRAGLGGSMRSVVGFLSQRGLHGDPLLTQDFQRRRLRGCRNLYKKDLLGHFGCVNAIEFSNNGGQWLVSGGDDRRVLLWHMEQAIHSRVKPIQLKGEHHSNIFCLAFNSGNTKVFSGGNDEQVILHDVER

SEQ ID NO: 2543 - protein, 296 aa, Homo sapiens [sequence omitted]

SEQ ID NO: 2544 - protein, 264 aa, Homo sapiens
MYARPEPFPPGPAARSDALAAAAALHGYGGMNLTVNLAAPHGPGAFFRYMRQPIKQELICKWLAADGTATPSLCSKTFSTMHELVTHVTVEHVGGPEQANHICFWEECPRQGKPFKAKYKLVNHIRVHTGEKPFPCPFPGCGKVFARSENLKIHKRTHTGEKPFRCEFEGCERRFANSSDRKKHSHVHTSDKPYTCKVRGCDKCYTHPSSLRKHMKVHGRSPPPSSGYDSATPSALVSPSSDCGHKSQVASSAAVAARTADLSE

SEQ ID NO: 2545 - protein, 147 aa, Homo sapiens [sequence omitted]

SEQ ID NO: 2546 - protein, 143 aa, Homo sapiens [sequence omitted]

SEQ ID NO: 2547 - protein, 140 aa, Homo sapiens [sequence omitted]

SEQ ID NO: 2548 - protein, 603 aa, Homo sapiens
MSHPDYRMNLRPLGTPRGVSAVAGPHDIGASPGDKKSKNRSTRGKKKSIFETYMSKEDVSEGLKRGTLIQGVLRINPKKFHEAFIPSPDGDRDIFIDGVVARNRALNGDLVVVKLLPEEHWKVVKPESNDKETEAAYESDIPEELCGHHLPQQSLKSYNDSPDVIVEAQFDGSDSEDGHGITQNVLVDGVKKLSVCVSEKGREDGDAPVTKDETTCISQDTRALSEKSLQRSAKVVYILEKKHSRAATGFLKLLADKNSELFRKYALFSPSDHRVPRIYVPLKDCPQDFVARPKDYANTLFICRIVDWKEDCNFALGQLAKSLGQAGEIEPETEGILTEYGVDFSDFSSEVLECLPQGLPWTIPPEEFSKRRDLRKDCIFTIDPSTARDLDDALSCKPLADGNFKVGVHIADVSYFVPEGSDLDKVAAERATSVYLVQKVVPMLPRLLCEELCSLNPMSDKLTFSVIWTLTPEGKILDEWFGRTIIRSCTKLSYEHAQSMIESPTEKIPAKELPPISPEHSSEEVHQQNADKDGAAHLQASHSPSAEDAEAQPSTEERLPETRGICDRDPDTRLFFLQQQSRVLEAKPQNTIRVEEQTTQLQI

SEQ ID NO: 2549 - protein, 132 aa, Homo sapiens
MGQTQPGLRLPASRGGHRLTRSQGLPPHWAFHKNLTNVQGQPKALRSAGWNTFPLPSRDIVFLDGVFKASMWRSRDERPRLSSVQRSRKLQNGHPPPSQHLQSLPRPKLLSCSAQDLPQPWSDALRPPPTLA

SEQ ID NO: 2550 - protein, 128 aa, Homo sapiens
MAAVEACGGSPVTRGIVRSQGGSLCLATVICDLFLCAYCHNRVRQRLLLREQFGEELEPRLAPWMPSFIIHSNPIWLGALLWVSHCPSSILGSLRPRGGKIQLRVGGSEPRRIMKATCFGNDLPLPVV

SEQ ID NO: 2551 - protein, 293 aa, Homo sapiens
MKFTKAQAVVYCTCSVFPEENEAVVKKALEFQDLGNKGQPYRLSPPVLPLCSLKEIQLSTDKFFRMEPSEITNGCFLSILTRERDPSETVSVNDVLARAAAKGLLDGIELGKSSKREKKKKKSKTSLTKGATTDNGIQMKIAEFLNRETKASANLSETVTKPPLPQKNTAQVGASSQTRKPNKLAPHPAVPAFVKNTCPSRPRERQTHFLRPRPEDRMVALKPIEIVLPPVFMPFSSPQGIRSRMPTQHLYCRWVAPKALVPTCLPTHSLSRKEEKPKDDTPSSLLRPPRRWL

SEQ ID NO: 2552 - protein, 121 aa, Homo sapiens
MQKQLLPLAAGQRCDYSQRESCCQSPHRAESAGDRSTDNGLHRGAERSFCCALDPLPRRPPAGRRGRDRSSSACPGARARVWPPGACASFRDSHKRFIMRRTALFHFTPTSFHLRYTLRKL

SEQ ID NO: 2553 - protein, 212 aa, Homo sapiens [sequence omitted]

SEQ ID NO: 2554 - protein, 351 aa, Homo sapiens
MGEGDAFWAPSVLPHSTLSTLSHHPQPQFGRRMESKVSEGGLNVTLTIRLLMHGKEVGSIIGKKGETVKKMREESGARINISEGNCPERIVTITGPTDAIFKAFAMIAYKFEEDIINSMSNSPATSKPPVTLRLVVPASQCGSLIGKGGSKIKEIRESTGAQVQVAGDMLPNSTERAVTISGTPDAIIQCVKQICVVMLESPPKGATIPYRPKPASTPVIFAGGQAYTIQGQYAIPHPDQLTKLHQLAMQQTPFPPLGQTNPAFPGLDASPPASTHELTIPNDLIGCIIGRQGTKINEIRQMSGAQIKIANATEGSSERQITITGTPANISLAQYLINARLTSEVTGMGTL

SEQ ID NO: 2555 - protein, 104 aa, Homo sapiens
MPRSSQHSESSPLDTTTQRKGASSLAHQVRVHTLETLLDWPELPQPLLTPPPVIDTAAGSRKRFLNKAQLAQCLAQQTINTCKLNCMILAQVLLMWLTATHLHG

SEQ ID NO: 2556 - protein, 499 aa, Homo sapiens
MAQGLVTFRDVAIEFSLEEWKCLEPAQRDLYREVTLENFGHLASLGLSISKPDVVSLLEQGKEPWMIANDVTGPWCPDLESRCEKFLQKDIFEIGAFNWEIMESLKCSDLEGSDFRADWECEGQFERQVNEECYFKQVNVTYGHMPVFQHHTSHTVRQSRETGEKLMECHECGKAFSRGSHLIQHQKIHTGEKPFGCKECGKAFSRASHLVQHQRIHTGEKPYDCKDCGKAFGRTSELILHQRLHTGVKPYECKECGKTFRQHSQLILHQRTHTGEKPYVCKDCGKAFIRGSQLTVHRRIHTGARPYECKECGKAFRQHSQLTVHQRIHTGEKPYECKECGKGFIHSSEVTRHQRIHSGEKPYECKECGKAFRQHAQLTRHQRVHTGDRPYECKDCGKAFSRSSYLIQHQRIHTGDKPYECKECGKAFIRVSQLTHHQRIHTCEKPYECRECGMAFIRSSQLTEHQRIHPGIKPYECRECGQAFILGSQLIEHYRIHTG

SEQ ID NO: 2557 - protein, 158 aa, Homo sapiens [sequence omitted]

SEQ ID NO: 2558 - protein, 127 aa, Homo sapiens
MWAQGRFFFVCFLFSETKSHSVPQAGVQQRNRHSLQPLPPGFKRFSCLSLPSSWDYRHWPPRPANFCIFSRDRVSPCWPGWSPTPDLRRSAHLSLPKFWDYRREPPCPAEDFKLGDSRACFYAIRNE

SEQ ID NO: 2559 - protein, 101 aa, Homo sapiens
MASLCLQDKVPAPQPCVKGLSKSFLCHLLSTLIPFTHSLFFLFLCLFLRQSRSVTQAGVQWRDLGSLQSPPPRFMLFSCLSLPSSWDYRHPPPRPAFFLYI

SEQ ID NO: 2560 - protein, 128 aa, Homo sapiens
MAAGRTDRATAAAARGSEVSGEGGKRCPSPRRRFPITLAQKLPHTHTPLLRSPGRAGAAPALLRSRAMQRPRRGGGEGEVCVTENGARAKRGHKQDGGHAVCTVSPFPFPLPWRLDSQYRAVRRSCAP

SEQ ID NO: 2561 - protein, 320 aa, Homo sapiens [sequence omitted]

SEQ ID NO: 2562 - protein, 228 aa, Homo sapiens [sequence omitted]

SEQ ID NO: 2563 - protein, 152 aa, Homo sapiens [sequence omitted]

SEQ ID NO: 2564 - protein, 140 aa, Homo sapiens [sequence omitted]

SEQ ID NO: 2565 - protein, 129 aa, Homo sapiens
MYVHEECYSVIFFIVLFLFLRWSLPLSPRPECGGTTSDHCNLCLSGSSDSPASASRIAGITGVYHHAWLLFVFLVEMGFHYIGQAGLELLTSSDPPILVSQSAVITGLSHRARPFFILFGFCIKVMLVS

SEQ ID NO: 2566 - protein, 164 aa, Homo sapiens
MSCVLSPILVLHRPLKSKRGDLVFFLCVLWSSSILDRPCMFRKRGSTLCPPKMMAHLSRPGWRLSYQSFCCLGGRLPAADVCPRLSSLQPLSSICRTLGHSCQCFPSVLTFHLSRRLGFHASGPNREMVTQTLRSWCHNPSQQLAGHLSAVACQHAGSSTDGGC

SEQ ID NO: 2567 - protein, 118 aa, Homo sapiens [sequence omitted]

SEQ ID NO: 2568 - protein, 127 aa, Homo sapiens
MLNVYKCLSENISAAIQANGEMVTKQPLIRSMRTVKRETLKLISGWVSRSNDPQMVAENFVPPLLDAVLIDYQRNVPAAREPEVLSTMAIIVNKLGGHITAEIPQIFDAVFECTLNMINKVCNISVM

SEQ ID NO: 2569 - protein, 208 aa, Homo sapiens
MSSLLGDTVQPGRPSCSGHFGIYPRAWVSSLCHRAPGLPPAPSALPTWPPPTWHPSPQAPAAPAVSHSAGAAGNFLCPAGALSFNAFKTVMDIDTSGTFNVSRVLYEKFFRDHGGVIVNITATLGNRGQALQVHAGSAKAAVDAMTRHLAVEWGPQNIRVNSLAPGPISGTEGLRRLGKALREPRPPTDPLLGHRVPMKLPEPWQGVC

SEQ ID NO: 2570 - protein, 100 aa, Homo sapiens [sequence omitted]

SEQ ID NO: 2571 - protein, 121 aa, Homo sapiens [sequence omitted]

SEQ ID NO: 2572 - protein, 193 aa, Homo sapiens [sequence omitted]

SEQ ID NO: 2573 - protein, 211 aa, Homo sapiens [sequence omitted]

SEQ ID NO: 2574 - protein, 123 aa, Homo sapiens
MSLILLCPQRLEGLLSLQAWRNIHANIPAIKLNPFSSEIPCLSPASNFIFLPQATVHLTQGKMKGLPITRTPEGACPEKSWHVTSHIHFLSSCPNWEILLWSIFKKAHCVLMKYFSGFQCYFL

SEQ ID NO: 2575 - protein, 123 aa, Homo sapiens
MCGQCQSSSGHMEEEAHPELCPHWPLQFSPQSHCRQAYGRDTHAGGPGARVDSGHHLGLFPGLLSTCPDGLCVFPVPSPTFSTSLHVLMECKVHQPGPLPGRGSADAGLRGLPQGRTLCVLTA

SEQ ID NO: 2576 - protein, 121 aa, Homo sapiens
MFTPSESPIQSLASWRALRFWYKRHFISTKWKSIIHIHLLLRHFSLESSSCLSTLGKRTGLIYITDILVMVWRDLWERRPSRGLSEGSFRMQLFWAEDGLHWPPPRRKASRVEKCPLTWLL

SEQ ID NO: 2577 - protein, 298 aa, Homo sapiens
MSSQTKFKKDKEIIAEYEAQIKEIRTQLVEQFKCLEQQSESRLQLLQDLQEFFRRKAEIELEYSRSLEKLAERFSSKIRSSREHQFKKDQYLLSPVNCWYLVLHQTRRESRDHATLNDIFMNNVIVRLSQISEDVIRLFKKSKEIGLQMHEELLKVTNELYTVMKTYHMYHAESISAESKLKEAEKQEEKQFNKSGDLSMNLLRHEDRPQRRSSVKKIEKMKEKRQAKYSENKLKCTKARNDYLLNLAATNAAISKYYIHDVSDLIDVSSLGSLGLSRAHTRAGTCHWLKEGLVFVFT

SEQ ID NO: 2578 - protein, 106 aa, Homo sapiens
MISKLLLALIPDMPAITSNLGLQFCFLGQYRASLILFYISDLQMYVYSSQVKPRLLSFRVNICNIFNHSSYHSFHTLLVSRPLVVLAAPVIRFLQKYRINRVYVCV

SEQ ID NO: 2579 - protein, 141 aa, Homo sapiens
MLPAALLRRPGLGRLVRHARAYAEAAAAPAAASGPNQMSFTFASPTQVRALRVGTLRGRRPRSPGSPPPGRDPRFRAPGPARPGSRGYSALDPRPCLCCPSPALPSSRAPPRDKRLLGALPDLPGQSLGVAGSLHSHFADQ

SEQ ID NO: 2580 - protein, 254 aa, Homo sapiens [sequence omitted]

SEQ ID NO: 2581 - protein, 127 aa, Homo sapiens
MAGLAAAVGVATPPHFPGSLPPSLEKHPQPMEPQYLTAEGREQQEGPQEAGPKDGMLQEDAPLAPGDWSPLRRPLARGGRAAAQASACGHLGQDSGGRGCPARLISLMLRDRWENSREKDVEWGGCH

SEQ ID NO: 2582 - protein, 135 aa, Homo sapiens
MAHRNQRQSHGHLSRPFLLEPARGACSRDTFLSASPRLPRPRQAASLAHRPEKSAPGADCPSGRRAAALDVRGPLWAGRGASALPSSSRVRSYPLGSRGTARGPVRSRADMNARQSGLAAANGARARTRLGSTFQ

SEQ ID NO: 2583 - protein, 128 aa, Homo sapiens
MISGVRNLPRTRSFLWRTGSEQPHVIRPLFPVGVSSGQDILASGPSAGSGIAASAGRPKSLLSEARHPNHLCSSHFVPWSSDKTQQDFMATELEGFRATEPESDTDILIPGATGYEENTYLILSEKIY

SEQ ID NO: 2584 - protein, 111 aa, Homo sapiens
MGGVSQLGYLWVRDPLEEAVCLFSDLRLRAGQTTTLFKAVRQGHLRLQNCLLPFVQLYPAPRGGVYRGRQASLSCGGLHALGASLPLCLPIQALAMVDTPPPASLPSCSSI

SEQ ID NO: 2585 - protein, 111 aa, Homo sapiens [sequence omitted]

SEQ ID NO: 2586 - protein, 126 aa, Homo sapiens [sequence omitted]

SEQ ID NO: 2587 - protein, 146 aa, Homo sapiens
MDCPSLSAAVSGPGITEAGQSACSYVATAPGCFVSARPWARLPCQTLGTPAFRVPGTQLLGSGQAVELQPAVLSVRCYTSQETSDKSVIELQQYAKKNKPNLHILSKLQEEMKRLAEEREETRKKPKMSIVASAQPGGEPLCTVDV

SEQ ID NO: 2588 - protein, 471 aa, Homo sapiens [sequence omitted]

SEQ ID NO: 2589 - protein, 104 aa, Homo sapiens
MECRWPGKELEEYLCIFTIHWVFHTHTEDENSQRCHHRGHRGNGGNWSCIPSPNIHTTDMKLGQLRLKVRMFHMLKMSWPCANGTGLLQSDSGNMEQSPSLLTP

SEQ ID NO: 2590 - protein, 350 aa, Homo sapiens
MPILSSSGSKMAACGGTCKNKVTVSKPVWDFLSKETPARLARLREEHRVSILIDGETSDIYVLQLSPQGPPPAPPNGLYLARKALKGLLKEAEKELKKAQRQGELMGCLALGGGGEHPEMHRAGPPPLRAAPLLPPGARGLPPPPPPLPPPLPPRLREEAEEQESTCPICLGEIQNAKTLEKCRHSFCEGCITRALQVKKACPMCGRFYGQLVGNQPQNGRMLVSKDATLLLPSYEKYGTIVIQYVFPPGVQGAEHPNPGVRYPGTTRVAYLPDCPEGNKVLTLFRKAFDQRLTFTIGTSMTTGRPNVITWNDIHHKTSCTGGPQLFGYPDPTYLTRVQEELRAKGITDD

SEQ ID NO: 2591 - protein, 148 aa, Homo sapiens [sequence omitted]

SEQ ID NO: 2592 - protein, 289 aa, Homo sapiens
MMRSSVFHMFILSMVTVDVIVAASNYYKGENFRRQYDEFYLAEVAFTVLFDLEALLKIWCLGFTGYISSSLHKFELLLVIGTTLHVYPDLYHSQFTYFQVLRVVRLIKISPALEDFVYKIFGPGKKLGSLVVFTASLLIVMSAISLQMFCFVEELDRFTTFPRAFMSMFQILTQEGWVDVMDQTLNAVGHMWAPVVAIYFILYHLFATLPPSLIRDLCGTQDACPSCLPLQPPNPLPGSQTLARLTHQALTTPPGMRSSQLFSKISLLLGICVAWESILGSLSLSHNLQ

SEQ ID NO: 2593 - protein, 212 aa, Homo sapiens
MEPYEAQKMMAEIRGSKETATQPLPLYDTPYEPEEDGATPEGEGAPWPRESRLPEDDERPPEEYDQPWEWKKERISKAFAVDIKVIKDLPWPPPVGQLDSSPSLPDGDRDISGPASPLPEPSLEDSSAQFEGPEKSCLSPGREEKGRLPPRLSAGNPKSAKPLSMEPSSPLGEWTDPALPLENQLVSRGHQPNRRREPAPAVQRGQLPGAQQ

SEQ ID NO: 2594 - protein, 128 aa, Homo sapiens
MGPAAGHAAPRGPPVPATTAGAALRAGASEPRQTQLGAPLALGEARGGPQDPSGEGAISPCPQGYKEVSGPVHGQMGPGKTLRVGIQWTRRSQMCCFYGCPLPPPVHPLCPGNKEPLRTQESPHPPSC

SEQ ID NO: 2595 - protein, 384 aa, Homo sapiens
MVSGDYSLGLNDLNVSPPELTVHVGDSALMGCVFQSTEDKCIFKIDWTLSPGEHAKDEYVLYYYSNLSVPIGRFQNRVHLMGDNLCNDGSLLLQDVQEADQGTYICEIRLKGESQVFKKAVVLHVLPEEPKELMVHVGGLIQMGCVFQSTEVKHVTKVEWIFSGRRAKEEIVFRYYHKLRMSAEYSQSWGHFQNRVNLVGDIFRNDGSIMLQGVRESDGGNYTCSIHLGNLVFKKTIVLHVSPEEPRTLVTPAALRPLVLGGNQLVIIVGIVCATILLLPVLILIVKKTCGNKSSVNSTVLVKNTKKTNPEIKEKPCHFERCEGEKHIYSPIIVREVIEEEEPSEKSEATYMTMHPVWPSLRSDRNNSLEKKSGGGMPKTQQAF

SEQ ID NO: 2596 - protein, 102 aa, Homo sapiens
MRGPGQSGGSVPERFIGAPYNPGRFLVPGTEMHCATALLAEAPEGPESAGQSERASGRRQLELRPEGEVRVIPPGARRSGPMEGQGSSRGQASRGWNVTPRS

SEQ ID NO: 2597 - protein, 125 aa, Homo sapiens
MTRWKSLKAPGPHKSSPCQLVASRRRLSAPALAASFWRVQESGAEPPSQHSLRGPPCCRLPTSRPRQKQCPPFRPCVPAPQRHGEVVSHSGVGGGRQSKERHPCRAWGPMVGDGVRGGLKLNSPA

SEQ ID NO: 2598 - protein, 141 aa, Homo sapiens
MAKYDLEARQAMQEQLSKNKELTQKLQVASESEEEEGGTEDVEELLVPDVVNEVQMNADGPNPWMLRSCTSDTKEAATQEDPEQLPELEAHGVSESEGEERPVAEEEILLREFEERRSLRKRSELSQDAEPAGSQETKGEL

SEQ ID NO: 2599 - protein, 109 aa, Homo sapiens [sequence omitted]

SEQ ID NO: 2600 - protein, 165 aa, Homo sapiens
MMELKPNAGSDRAWVWNTHADFADECPKPELLAIRFLNAENAQKFKTKFEECRKEIEEREKKGDVVPWVGGLLCRLTLHLTILPGGCFFCLPDKHSRVLWPPHVSRVMQLPGDTGASWGALSTCQCCWPQSNWAGIGVRALPGAHQKVLYDGPRFVSQRAWSPLP

SEQ ID NO: 2601 - protein, 374 aa, Homo sapiens
MEPTEPMEPTEPMEPTEPMEPTEPMEPTEPMEPTEPMEPARSAHRGGEALLRELEVLVQDVVRTSSWWERHGVDCAILALSLFALPAGFLCLRWENALVFASGITILGVCHYTLTVKGSHLATHGALTESKRWSKIWLLFFVEVCTAFTAEHATHGHVKMHHAYTNVVGLGDSSTWRLPCLNRYVYMFLAPFLLPIATPLVAVERLRKVELGTALRTLALISLGLYSHYWLLLNVSGFKNPSSALGCMFLTRSLLAHPYLHVNIFQHIGLPMFSRDNKPRRIHMMSLGVLNLARLPVLDWAFGHSIISCHVEHHLFPRLSDNMCLKVEPVVSQFLREKQLPYNEDSYLARFQLFLRRYEEFMVQAPPITELVGL

SEQ ID NO: 2602 - protein, 153 aa, Homo sapiens
MAARTLGRGVGRLLGSLRGLSGQPARPPCGVSAPRRAASGPSGSAPAVAAAAAQPGSYPALSAQAAREPAAFWGPLARDTLVWDTPYHTVWDCDFSTGKIGWFLGGQLNVSVNCLDQHVRKSPESVALIWERDEPGTEVRITYSPWLQMPCGP

SEQ ID NO: 2603 - protein, 559 aa, Homo sapiens
MLGSLLAFHYGLYFYTVKFLAVVFCLIGYVPSVILFTYIASFTFKKILNTKEFWSFIYSVAALACIAITEITFFMGYTIATILHYAFCIIIPIYPLLGCLISFIKISWKNVRKNVDTYNPWDRLSVAVISPYLQCVLWIFLLQYYEKKYGGRSIRKDPFFRNLSTKSKNRKLPEPPDNEDEDEDVKAERLKVKELMGCQCCEEKPSIMVSNLHKEYDDKKDFLLSRKVKKVATKYISFCVKKGEILGLLGPNGAGKSTIINILVGDIEPTSGQVFLGDYSSETSEDDDSLKCMGYCPQINPLWPDTTLQEHFEIYGAVKGMSASDMKEVISRITHALDLKEHLQKTVKKLPAGIKRKLCFALSMLGNPQITLLDEPSTGMDPKAKQHMWRAIRTAFKNRKRAAILTTHYMEEAEAVCDRVAIMVSGQLRCIGTVQHLKSKFGKGYFLEIKLKDWIENLEVDRLQREIQYIFPNASRQESFSSILAHKIPKEDVQSLSQSFFKLEEAKHAFAIEEYSFSQATLEQVFVELTKEQEEEDNSCGTLNSTLWWERTQEDRVVF

SEQ ID NO: 2604 - protein, 152 aa, Homo sapiens [sequence omitted]

SEQ ID NO: 2605 - protein, 301 aa, Homo sapiens
MDVGFSRTTVQTLSRSHCKNIKQKISQWEGRANGISNPEKWCPKDFGVRYNCHQEIRLKKNPIAERKSKNLDVTSRENVGLDINENTKSHDQSENENKKHEYDDTHFFKNESESNWVCSRVKEIESCKEDVLDPETSLPPGNFYTSQILWKKIEAPPPDKLLNLALEHCDSSEKELNFRVLDSSYGITKSLENIYSEPEGQECGPSINPLPKPRRTFRYLSESGVTPYKERNCDKKYCENNSCAQSSLASSQEPEPKKYGGKIRGRSKRYVFILQIKTCRYFPYRIIELLFPFQTSFHFPA

SEQ ID NO: 2606 - protein, 287 aa, Homo sapiens [sequence omitted]

SEQ ID NO: 2607 - protein, 161 aa, Homo sapiens
MQTHEVPAPGPPQSHSPLFVPWGILCFVFGASCYLTVVLLPHVDVSGSTHPSHASHSSMPAHCMSCCTTVSFPHVGLGALPMFQHRDLAYPCYLPALWYSPIRIHHCICTRSFMDRRLGTLWFFLMKMTPVGQAQWLTPVIPALWEAETGGSPEVRSLRPA

SEQ ID NO: 2608 - protein, 131 aa, Homo sapiens
MFLGLVGLRTKGRRWISSWSEGEDRGQSPEGVLLTWVFGTKCVMHPCEETTKQALCEQQGCLFHLGADELSPKRESAQSISFKWENSIYLHATLFLIGEYLHLAFYYFLLVLYILCSFLSYCLLLWLGSFL

SEQ ID NO: 2609 - protein, 100 aa, Homo sapiens
MMSEARVWWGQMAGRPKRCRKGRLGPLGLKRSCEVVWKPRLGLTSLPGSRLDRNHLLKASLWCSDYVYPVLLLSSFLECSSISSTQFCDSWIFVCCKVFC

SEQ ID NO: 2610 - protein, 111 aa, Homo sapiens [sequence omitted]

SEQ ID NO: 2611 - protein, 656 aa, Homo sapiens
MKCPMLRSRLGQESVHCGPMFIQVSRPLPLWRDNRQTPWLLSLRGELVASLEDASLMGLYVDMNATTVTVQSPRQGLLQRWEVSGGQQALPGVSFQPESEVLVHIPKQRLGLVKRGSYIEETLSLRLLRVHQSNIFMVTENKDFVVVSIPAAGVLQVQRCQEVGGTPGTQAFYRVDLSLEFAEMAAPVLWTVESFFQCVGSGTEPPASTAALRTTPSPPSPGPETPPAGVPPAASSQVWAAGPAAQEWLSRDLLHRPSDALAKKGLGPFLQTAKPARRGQTSASILPRVVQAQRGPQPPPGEAGIPGHPTPPATLPSEPVEGVQASPWRPRPVLPTHPALTLPVSSDASSPSPPAPRPERPESLLVSGPSVTLTEGLGTVRPEQDPAKSPGSPLLLRGLSSGDVAAPEPIMGEPGQASEEFQPLARPWRATLAAEELVSHRSPGEPQETCSGTEVERPRQTGPGLPREGARGHMDLSSSEPSQDIEGPGLSILPARDATFSTPSVRQPDPSAWLSSGPELTGMPRVRLAAPLAVLPMEPLPPEPVRPAALLTPEASSVGGPDQARYLESAPGWPVGQEEWGVAHTSSPPSTQTLSLWAPTGVLLPSLVELEYPFQAGRGASLQQELTEPTLALSAESHRPPELQDSVEGLSERPSR

SEQ ID NO: 2612 - protein, 758 aa, Homo sapiens
MDPGDPAGDPAAGERHRMGRDPLLLLQALQTLWSTRERKQLREEAWRGFAALDDPLAGLLDMLESCRGQRGEGPSLAAWISHQLQCWLQAQPCPSLAQHSLRLKRLQARAVKVLTESPPSLAAPLASIFQLQDADRSCLLAHVHRLHHEGRFREAATLGTTLKLQSELGVEKMSIPLLLQDKVALVERYVAGFPDLQRRLLVLMDSWCQPGFDIKDVARQYPEVTSLSLEKLSPKALSRQVLRLQERYSVAPALCPNAAIQQRLAALRHLCHKRFVEKSLSQENWTDHVQGLVGQSPWLQEQLSQLLVSHSDPVTAAQCAMDLLLPEERLPAAVAVELRRFRLQGRATEADSRLEVKDMKDRYYQLPIPRENVHLLASWEDLTRHEGALLQCHQVVGVDVEWTPVFVAGGRPRPSLLQVAVEGHVFLLDVLALSQPPTGQGAQAFSRLVAQLLSDPSITKLGYGMVGDLQKLGTSCPALAHVEKQILGGMDLLLVHRQMRVASVPAPAVDRARELRGLSLLVQQVLGTALDKTQQLSNWDRRPLYEEQVIYAAADAYCLLEVHQALCREPARFHLSEDLAGSRRPRHRERPGARKPPGLQKASAPAAPRQVPVAVAVSEGAAPQIPARAFRVVCDNMLQGLARSLRCLGVDARMLGNGEDHRRAAEVARQEGRIILTSGQPFHKLRAQVGAGRCLSVDCSLKAQQQAKAVLKHFNVRVTHADIFSRCQACNCDQYLKVSRDMMKQLMWLSSHQEGPRS

SEQ ID NO: 2613 - protein, 118 aa, Homo sapiens [sequence omitted]

SEQ ID NO: 2614 - protein, 135 aa, Homo sapiens
MSCESHCGWPEGATHSHFRLTGAFVPTPAFICVLFYVFSQSPELQALVTPDSSLLSPLSSPQHLYVCPRLHFPLFCLDQTTLTFLGLRATACSGRCLTAPANPLAPTPRPGFLNRSLSRSLSLASSLLNQEAGPC

SEQ ID NO: 2615 - protein, 302 aa, Homo sapiens
MLAFNGSWTIDAVTEKFGVHIFTLHGPYLITFLILITILFKFSSDEHTPVEDEEPKKSTTSASTSEEEKKKKSSRSKERSKKRRKKKSSKRKHKKYSEDSDSDSDSETDSSDEDNKRRAKKAKKKEKKKKHRSKKYKKKRSKKSRKESSDSSSKESQEEFLENPWKDRTKAEEPSDLIGPEAPKTLTSQDDKPLNYGHALLPGEGAAMAEYVKAGKRIPRRGEIGLTSEEIASFECSGYVMSGSRHRRMEAVRLRKENQIYSADEKRALASFNQEERRKRENKILASFREMVYRKTKGKDDK

SEQ ID NO: 2616 - protein, 153 aa, Homo sapiens [sequence omitted]

SEQ ID NO: 2617 - protein, 132 aa, Homo sapiens
MAEKPHQNSCNSVRQLFKTKQLVTHRDRGSCTHRAQGLLAARTTALQRSPLQQEIWESTTALNLPSALAPQGLTAKDAHFLGDTDPIQEGARDHAAGGPFQDRQASVAAQTLSWERGQGFSRHHGNHLLYSH

SEQ ID NO: 2618 - protein, 646 aa, Homo sapiens
MSRRKENEEVDKQTRIAIVSDDKCKPKRCRQECKKTCPVVRMGNLCIEVTPTSKIASLSEELCIGCGICVKKCPFEAITIINLPSNLEKHTTHRYSKNSFKLHRLPIPRPGEVLGLVGQNGIGKSTALKILAGKQKPNLGKYANPPDWTEILSYFRGSELQNYFTKILEDNLKALVKPQYVDQIPKAVRGAVGDLLDKKDERELQTKICEMLDLSHIRDREIAQLSGGELQRFAIAMVCIQNADIFMFDEPSSYLDVKQRLNAALTIRSLLHPTKFIIVVEHDLSVLDYLSDFICCLYGVPGCYGVVTMPFSVREGINIFLDGFVPTENMRFRTESLTFKVSESATEEEIKRMNHYVYPAMVKTLGKFELTVEKGHFSDSEILVLLGENGTGKTTFIRMLAGNLQPDGEVELPMLNISYKPQKISPKFQNHVRHLLHDKIRDAYVHPQFIADVMKPMKIEEIMDQEVQNLSGGELQRVALVLCLGKPADVYLIDEPSAYLDSEQRLVAAKVIKRYILHAKKTGFVVEHDFIMATYLADRVIVIEGQPSVKTTAFSPQSLLNGMNRFLELLGHRTETLRPVLLLGGRSLQLRQDHGQLRWDSSFLYVLLSFPSFILHSFVEEHICFQINLLLLSRIAYNRKLGINCT

SEQ ID NO: 2619 - protein, 126 aa, Homo sapiens
MAFCLQKQVEAGVCVTMEMVKDALDQLRGAVMIVYPMGLPPYDPIRMEFENKEDLSGTQAGLNVIKEAEAQLWWAAKELRRTKKLSDYVGKNEKTKIIAKIQQVSTFCFNVSVVFVISLQTDKNVQ

SEQ ID NO: 2620 - protein, 163 aa, Homo sapiens [sequence omitted]

SEQ ID NO: 2621 - protein, 100 aa, Homo sapiens [sequence omitted]

SEQ ID NO: 2622 - protein, 487 aa, Homo sapiens
MVSAIRKFLEGIPDLQLVYTHHPLLLRFFLLYPELMSRYGHRVLELWFFWEESSYEELDDVTSAGQPALPASLVVLFQLLRSIPSILLILLDLIYSSPVDTAHKVLISLRTFLRRNEDIQVGGLIRGHFLLILQRLLVEHGASPSGASGNLPLLLSLLSLMQLRNVSEQELDSVAMKLLHQVSKLCGKCSPTDVDILQPSFNFLYWSLHQTTPSSQKRAAAVLLSSTGLMELLEKMLALTLAKADSPRTALLCSAWLLTASFSAQQHKGSLQVHQTLSVEMDQVLKALSFPKKKAALLSAAILCFLRTALRQSFSSALVALVPSGAQPLPATKDTVLAPLRMSQVRSLVIGLQNLLVQKDPLLSQACVGCLEALLDYLDARSPDIALHVASQPWNRFLLFTLLDAGENSFLRPEILRLMTLFMRYRSSSVLSHEELQSMGHLADHSMAQTLQASLEGLPPSTSSGQPPLQDMLCLGGVAVSLSHIRN

SEQ ID NO: 2623 - protein, 283 aa, Homo sapiens
MKSRSRSRERKKSRSRSRERKRRIRSRSRSRSRHRHRTRSRSRTRSRSRDRKKRIEKPRRFSRSLSRTPSPPPFRGRNTAMDAQEALARRLERAKKLQEQREKEMVEKQKQQEIAAAAAATGGSVLNVAALLASGTQVTPQIAMAAQMAALQAKALAETGIAVPSYYNPAAVNPMKFAEQEKKRKMLWQGKKEGDKSQSAEIWEKLNFGNKDQNVKFRKLMGIKSEDEAGCSSVDEESYKTLKQQEEVFRNLDAQYEMARSQTHTQRGMGLGFTSSMRGMDAV

SEQ ID NO: 2624 - protein, 177 aa, Homo sapiens [sequence omitted]

SEQ ID NO: 2625 - protein, 273 aa, Homo sapiens [sequence omitted]

SEQ ID NO: 2626 - protein, 127 aa, Homo sapiens
MPVSTWSLFWAWLLASALRYKMTIVTLQVAGAPLVTATTTAVSSVLLAPSVFQQTVTRSSDLERKASSPSPLTIGTPESQRKPSIILSKSQLQDTLIHLIKNDSSFLSTLHEVYLQVLTKNKDNHNL

SEQ ID NO: 2627 - protein, 141 aa, Homo sapiens [sequence omitted]

SEQ ID NO: 2628 - protein, 110 aa, Homo sapiens [sequence omitted]

SEQ ID NO: 2629 - protein, 361 aa, Homo sapiens
MSADATPLHVARSGNDTEDFSNPSACSDIYGESISSHFTESTGKLIESLSDCASSLPIKKIAGSNYNTFLDSELSMLNGTKVLSDSAVGIDLGSTGDTTEALHELRTAEEFKTEEQDDSGSIEFGVSFPDRESSSMETSIEPKATETSRTEGITAIEESWESMFNDDGDCLDPRLLQELSGNTKSRESIQEPRSDYYNHEVPDIDLSDCEFPHVIEIYDFPQEFRTEDLLRVFCSYQKKGFDIKWVDDTHALGVFSSPITARDALGIKHTMVKIRPLSQATRAAKAKARAYAEFLQPAKERPETSAALARRLVISALGVRSKQSKTEREAELKKLQEARERKRLEAKQREDIWEGRDQSTV

SEQ ID NO: 2630 - protein, 157 aa, Homo sapiens
MQFRSGGVLAPGERARKLSRGAPARARGPGSGLRHHAPLRPLPGVCQPAGPRRGPPSSQPRGTRGSASSPPHPPPPPLPATAGPGGTGLERDRFESHSSSFVWPCGWFLCGRACRFRKVLGCELPPSPAPDLLVVGDSRHGNGSLRKGLKAERELMA

SEQ ID NO: 2631 - protein, 134 aa, Homo sapiens [sequence omitted]

SEQ ID NO: 2632 - protein, 241 aa, Homo sapiens
MWVAPLQGSQASREVGATALPPASLGLAGLCSDNTAVAGPLQLSRAQFPCWPHYGIGPCVDTDELTPQMPPGRSPRLQWPNSCCVRNQLKESFLLSQTLQEFLVTGRGSDSGPQPLAGKGATSWVGMPSSSVGPARPSLRGSSEQLAWLRGIFSYRSSPPPSPQQSSPNQTRSRQVGLGFCQPPGQQGWVGRLGPVSAVLPGPRPGWEGTLVLISRLHFCASLCCHKQRSQPHFLDGESGH

SEQ ID NO: 2633 - protein, 133 aa, Homo sapiens [sequence omitted]

SEQ ID NO: 2634 - protein, 101 aa, Homo sapiens
MLPGEGCRGGGGDPGPPSAGHLKCSTSPVDASCHASHRGVFEIPSATWAGGKWMFLGFLSLLPADSILLLFVYGLKHEFEEFCPPWQYWEEDSFVQVRLDN

SEQ ID NO: 2635 - protein, 599 aa, Homo sapiens
MATAVETEACQPTDASWESGGGGDDEMKQALPELESSPQNGGGGGLNIAEPSGGAGREENAGAEAAQSLSHGQPQDSSEAGAAALPRGPEEPERPVRRSFQIPRKSREKKALFQPLTPGSREFEDVVNILHSSYLEPTSVTNFNYRRACLVHNELLEKEFTEKRRELKFDGRLDKELSESYAFLMVDRYQVQTICEKGLHVGQSKITILGSPSMGVYLSRYADLLQANPLDTGAMGDVVIFKIMKGKIKSIYDPMGVKSLESMLNKSALDPTPKHECHVSKNANRITSLLAYRAYELTQYYFYEYGFDELRRRPRHVCPYAVVSFTYKDDIQTPKFVPSSRSNSFNTDRNIDKYNYTLWKGQLLNKGKLLCYISLRSATRAFLPIKLPEKLDVETVMSIDHLKQKIPPALFYKETYLGPNEVLKNGMYCSLYEVVEKTRIGSNMESLLQKLDREKLVLVKPLGDRGYLFLLSPYQMVPPYEYQTAKSRVLHALFLFQEPRSIVTSQKGSTNAAPQERHESMPDVLKIAQFLQFSLIQCRKEFKNISAINFHSVVEKYVSEFFKRGFGSGKREFIMFPYDSRLDDKKFLYSAPRNKSHID

SEQ ID NO: 2636 - protein, 102 aa, Homo sapiens
MGSGRPQVGWGGFWRPSSNSCSGGGLVRSALWPPGLWRGEIRAGAATGGRAPCAGEAHSWNQKAPGGILALTSPSRVALGKVPDLDLSLLICKTGRTVIPTL

SEQ ID NO: 2637 - protein, 279 aa, Homo sapiens
MQLVNLWGVYPRENPRILFFLSNQRNHLTLHMSSGVPTPTKSVLDSPSRLDEEHRLIARYAARLAAEAGNVTRPPTDLSFNFDANKQQRQLIAELENKNREILQEIQRLRLEHEQASQPTPEKAQQNPTLLAELRLLRQRKDELEQRMSALQESRRELMVQLEELMKLLKEEEQKQAAQATGSPHTSPTHGGGRPMPMPVRSTSAGSTPTHCPQDSLSGVGGDVQEAFAQGTRRNLRNDLLVAADSITNTMSSLVKELHSAEEGAEEEEEKMQNGKDRG

SEQ ID NO: 2638 - protein, 185 aa, Homo sapiens [sequence omitted]

SEQ ID NO: 2639 - protein, 117 aa, Homo sapiens [sequence omitted]

SEQ ID NO: 2640 - protein, 141 aa, Homo sapiens
MWVLGIAATFCGLFLLPGFALQIQCYQCEEFQLNNDCSSPEFIVNCTVNVQDMCQKEVMEQSAGIMYRKSCASSAACLIASAGYQSFCSPGKLNSVCISCCNTPLCNGPRPKKRGSSASALRPGLRTTILFLKLALFSAHC

SEQ ID NO: 2641 - protein, 122 aa, Homo sapiens
MPEDRTAGRVLAGHGVCLQGRGPDRGHDGRLRARLCPAAPADDALAEGGEAWARGRATLILSPWGDHTSRSLAADPSHPCLCGPAHLGNTPRNKVPRGPHRCVYWLTRGGVWGPLTSPWGQR

SEQ ID NO: 2642 - protein, 171 aa, Homo sapiens [sequence omitted]

SEQ ID NO: 2643 - protein, 200 aa, Homo sapiens [sequence omitted]

SEQ ID NO: 2644 - protein, 197 aa, Homo sapiens
MKKELDKAQGLQMQLNEFKQSKLITHEKFESACEELNNALLREEQAQMLLNEQAQQLQELNYKLELHSSEEADKNQTLGEAVKSLSEAKMELRRKDQSLRQLNRHLTQLEQDKRRLEENIHDAESALRMAAKDKECVANHMRAVENTLHKVRDQISLSWSAASRNDFTLQLPKLHLETFAMEGLKGGPEVVACQVRV

SEQ ID NO: 2645 - protein, 362 aa, Homo sapiens
MAPKPGAEWSTALSHLVLGVVSLHAAVSTAEASRGAAAGFLLQVLAATTTLAPGLSTHEDCLAGAWVATVIGLPLLAFDFHWCTNGHLMCAGCFIHLLADARLKEEQATCPNCRCEISKSLCCRNLAVEKAVSELPSECGFCLRQFPRSLLERHQKEECQDRVTQCKYKRIGCPWHGPFHELTVHEAACAHPTKTGSELMEILDGMDQSHRKEMQLYNSIFSLLSFEKIGYTEVQFRPYRTDDFITRLYYETPRFTVLNQTWVLKARVNDSERNPNLSCKRTLSFQLLLKSKVTAPLECSFLLLKGPYDDVRISPVIYHFVFTNESNETDYVPLPIIDSVECNKLLAAKNINLRLFLFQIQK

SEQ ID NO: 2646 - protein, 501 aa, Homo sapiens [sequence omitted]

SEQ ID NO: 2647 - protein, 119 aa, Homo sapiens
MKMGHKAQHSPSAHSLRVTVITGVGPPAPPRSSALPLAGRKEPPALPTPVTYLAQIWLQAPRVPGLLYPGSCLSAAPYVPDHKASTCTGVCAQQLGRRLTSDGGLWIPALSFPGWVTST

SEQ ID NO: 2648 - protein, 108 aa, Homo sapiens [sequence omitted]

SEQ ID NO: 2649 - protein, 199 aa, Homo sapiens
MKNRKTLHRAKNEDLDPVLIEWVRQQRSKDTPLTGLLVVKQARIYHEELNFEGECEYSGGWLQKFKKCLGIKYLQICGEKASPDDEATENYIDEFAKVISDENPSPEQIYSADETALYWCYVPRKTLTMANKRATTDVKDTKQKLTVLECANAAGTHKIKLAVIGNSLYPRCLKGVHNLPVHCYAHKKASVTGNLFQLV

SEQ ID NO: 2650 - protein, 101 aa, Homo sapiens [sequence omitted]

SEQ ID NO: 2651 - protein, 182 aa, Homo sapiens [sequence omitted]

SEQ ID NO: 2652 - protein, 141 aa, Homo sapiens [sequence omitted]

SEQ ID NO: 2653 - protein, 192 aa, Homo sapiens
MASDVEGLYAAVKALVCVVKSNPLASKEMERIKGYQLLAMLLKKKRSLLNSHILHLTFSLVGTVDSGHETSIIPNSTAFQDLLCDFEVWLHAPYELHLSLFEHFIELLTESSEASKNAKLMREFQLIPKLLLTLRDMSLSQPTIAAISNVLSFLLQGFPSSNDLLRFFLAWIKRKENTRKQTEARQGTSMEG

SEQ ID NO: 2654 - protein, 209 aa, Homo sapiens [sequence omitted]

SEQ ID NO: 2655 - protein, 675 aa, Homo sapiens [sequence omitted]

SEQ ID NO: 2656 - protein, 233 aa, Homo sapiens [sequence omitted]

SEQ ID NO: 2657 - protein, 185 aa, Homo sapiens
MPVKTRAEGEDDGFGEAGDPRRLLERPWRFRGCLPGKGNRDVGFEGTEGTTSTRPEWVWSCRCCLGCRASTRERVTSPVRAAGPQPRFTDRETEAAAGTLAHMGFAPPTSFSHFTDQELRDCPSLECLGVVEGDPHVLCSTLSLSRPSPSATLTLLLASSCLLAPAPPSFILLLFTLIAPDLPHS

SEQ ID NO: 2658 - protein, 147 aa, Homo sapiens
MPRYLEYKKIPNSNPPEYEFLWGLRARHETSKMRVLRFIAQNQNRDPREWKAHFLEAVDDAFKTMDVDMAEEHARAQMRAQMNIGDEALIGRWSWDDIQVELLTWDEDGDFGDAWARIPFAFWARYHQYILNSNRANRRASFFSWIQ

SEQ ID NO: 2659 - protein, 302 aa, Homo sapiens
MFGVGNTAAQPRGMQQPPAQPLSSSQPNLRAQVPPPLLSPQVPVSLLKYAPNNGGLNPLFGPQQVAMLNQLSQLNQLSQISQLQRLLAQQQRAQSQRSVPSGNRPQQDQQGRPLSVQQQMMQQSRQLDPNLLVKQQTPPSQQQPLHQPAMKSFLDNVMPHTTPELQKGPSPINAFSNFPIGLNSNLNVNMDMNSIKEPQSRLRKWTTVDSISVNTSLDQNSSKHGAISSGFRLEEPPFVPYDFMNSSTSPASPPGSIGEGWPRAKSPNGSSSVNWPPGKIFSNTFFHETVFPLRFCYIWTYY

SEQ ID NO: 2660 - protein, 291 aa, Homo sapiens [sequence omitted]

SEQ ID NO: 2661 - protein, 100 aa, Homo sapiens
MCTLGLRSIALKALKRPWVAAAAVVCLMLPFAAAGPSSDSAFGSTPALPCCLCKCWTSRHTHTRPQLSTELERPFLEFSVWESPLLGFTCSASCLSVRHL

SEQ ID NO: 2662 - protein, 123 aa, Homo sapiens
MNMAHCSLDFLGSSNLPTLASRGAETTGTCCHTQIFFKVFCRDRSCYVARAGLKLLDSSSPPALSSQSAGITGVSHCTWPVLGILYKWNQYVTFCIWLLLPSFMFSMFFPIASCISTFFLFVA

SEQ ID NO: 2663 - protein, 131 aa, Homo sapiens
MEGKRGEQRKHIQKSPRGLCASAPFSCCLEQDVSRKMFLSKVFMEPLLPLYLCSSLKLRTHVSAKTSGDPKRERHQQVTSGGLATKEYLKFNSEQVQKQHPKPQAPPHAGTRKLKFHQGVYLVFLAGNEDG

SEQ ID NO: 2664 - protein, 116 aa, Homo sapiens [sequence omitted]

SEQ ID NO: 2665 - protein, 314 aa, Homo sapiens
MPTPLAPRRPGAPEPPSQHVWQHRLLATASGRSRSSRPGTGTCDSTLYTSAWPPLTPCCSLTLGTLFTHWAAPTRGPELCGHLPLCGEGARPGSRMPLKSPVPFLPGTSPSADGPDSFSCVFEAILESHRAKGTSYTSLASLEALASPGPTQSPFFTFELPPQPPAPRPDPPAPAPLAPLEPDSGTSSAADGPWTQRGEEEEAEARAKLAPGREPPSPCHSEDSLGLGAAPLGSEPPLSQLVSDSDSELDSTERLALGSTDTLSNGQKADLEAAQRLAKRLYRLDGFRKADVAFFFFFFFFFFFFFFLTIVFNL

SEQ ID NO: 2666 - protein, 107 aa, Homo sapiens [sequence omitted]

SEQ ID NO: 2667 - protein, 376 aa, Homo sapiens
MAMTPERQNAYISQQMSPFEAVQEQVTSKCSRIKASPPSSKHLMPPRTGLLQNNLSPGMIPLTRHQSCEGMGVISPTLGKRQGIFTSSPQCPILSHSGQTPLGRLDSVCQHMQSPKATPPEVPLPGFCPSSLGTQSLSPHQLRRPSVPRMPTAFNNAAWVTAAAAVTTAVSGKTPLSQVDNSVQQHSPSGQACLQRPSDWEAQVPAAMGTQVPLANNPSFSLLGSQSLRQSPVQGPVPVANTTKFLQQGMASFSPLSPIQGIEPPSYVAAAATAAAASAVAASQFPGPFDRTDIPPELPPADFLRQPQPPLNDLISSPDCNEVDFIEALLKGSCVSPDEDWVCNLRLIDDILEQHAAAQNATAQNSGQVTQDAGAL

SEQ ID NO: 2668 - protein, 157 aa, Homo sapiens [sequence omitted]

SEQ ID NO: 2669 - protein, 109 aa, Homo sapiens
MGMGFASVHARLGGLTAPLVTTLGEYSTILPPVSFGATAILAGLAVCFLTETRNMPLVETIAAMERSLPLMRSRSWTVLLPSRLTATSLPDSPASACRVPAIAGTRCHT

SEQ ID NO: 2670 - protein, 101 aa, Homo sapiens [sequence omitted]

SEQ ID NO: 2671 - protein, 175 aa, Homo sapiens
MLVGTLDGTMPARVELMGNLDGAGLVSALEGTAPGGFELVGNLEGTVLTDAGLAGTFRATVFTGIKVVGTLEGRELAGASAPLEQMIGSAWSLSAPCLPSAAPAEAKPGDEEEKEVPVDTTDPVGPGKRLALGVERARGWKETDGDTGPRDGVRLEVAPAGGKTQVETQTQRPLP

SEQ ID NO: 2672 - protein, 207 aa, Homo sapiens [sequence omitted]

SEQ ID NO: 2673 - protein, 295 aa, Homo sapiens [sequence omitted]

SEQ ID NO: 2674 - protein, 358 aa, Homo sapiens
MGANTSRKPPVFDENEDVNFDHFEILRAIGKGSFGKVCIVQKNDTKKMYAMKYMNKQKCVERNEVRNVFKELQIMQGLEHPFLVNLWYSFQDEEDMFMVVDLLLGGDLRYHLQQNVHFKEETVKLFICELVMALDYLQNQRIIHRDMKPDNILLDEHGHVHITDFNIAAMLPRETQITTMAGTKPYMAPEMFSSRKGAGYSFAVDWWSLGVTAYELLRGRRPYHIRSSTSSKEIVHTFETTVVTYPSAWSQEMVSLLKKLLEPNPDQRFSQLSDVQNFPYMNDINWDAVFQKRLIPGFIPNKGRLNCDPTFELEEMILESKPLHKKKKRLAKKEKDMRKCDSSQVSRSPPNSGSWVSP

SEQ ID NO: 2675 - protein, 111 aa, Homo sapiens
MSGSQRRKPRPTGVPGRPGRVAGFAPRRKGLPAFVPPAHQVLPSWPTLTSALCVSPGPGIIGSSQTRESIRSATRTWRPESSPSAAAAPSSASTPRATGGACPPAARLCVL

SEQ ID NO: 2676 - protein, 106 aa, Homo sapiens
MLPEFSSASHYFILLLTMGPVIFIHSFIQQICIKCSLYARHTLQAGDRARNEPEALPALEELRVQQRRHRLQPAMIIDYQESAFWGENAHRAWRACSTSTEFLSFL

SEQ ID NO: 2677 - protein, 191 aa, Homo sapiens
MSPSHMLGPFRKVPDRVTGAIFHALVQCVAPRGSQLYQNQNSICQLSAEAFVFCSPPTELSAIYLQAFCGISWLFICRPFFPAPNSWVGSVCLKSLSSQSCTRVPLCAVLDPTAGPSGLRARKELSNLWLETLLFFSFFSLLSSSFYFRLIPSLFFFVPLLFLFLLPTISELLTFSYNPSLFPFSFCPPLL

SEQ ID NO: 2678 - protein, 148 aa, Homo sapiens [sequence omitted]

SEQ ID NO: 2679 - protein, 264 aa, Homo sapiens
MCHKNGFPQEGGITAAFLQKRKLRLSKNHRPARAKVTEHVRGTRPGRATAGPAASTRAAGSLFFDRWGNRGPAGCRGSSHLPQQLKFTTSDSCDRIKDEFQLLQAQYHSLKLECDKLASEKSEMQRHYVMYYEMSYGLNIEMHKQAEIVKRLNGICAQVLPYLSQEHQQQVLGAIERAKQVTAPELNSIIRQQLQAHQLSQLQALALPLTPLPVGLQPPSLPAVSAGTGLLSLSALGSQAHLSKEDKNGHDGDTHQEDDGEKSD

SEQ ID NO: 2680 - protein, 105 aa, Homo sapiens [sequence omitted]

SEQ ID NO: 2681 - protein, 545 aa, Homo sapiens
MAMMVFPREEKLSQDEIVLGTKAVIQGLETLRGEHRALLAPLVAPEAGEAEPGSQERCILLRRSLEAIELGLGEAQEEKGDVPKDTLDDLFPNEDEQSPAPSPGGGDVSGQHGGYEIPARLRTLHNLVIQYASQGRYEVAVPLCKQALEDLEKTSGHDHPDVATMLNILALVYRDQNKYKEAAHLLNDALAIREKTLGKDHPAVAATLNNLAVLYGKRGKYKEAEPLCKRALEIREKVLGKFHPDVAKQLSNLALLCQNQGKAEEVEYYYRRALEIYATRLGPDDPNVAKTKNNLASCYLKQGKYQDAETLYKEILTRAHEKEFGSVNGDNKPIWMHAEEREESKDKRRDSAPYGEYGSWYKACKVDSPTVNTTLRSLGALYRRQGKLEAAHTLEDCASRNRKQGLDPASQTKVVELLKDGSGRRGDRRSSRDMAGGAGPRSESDLEDVGPTAEWNGDGSGSLRRSGSFGKLRDALRRSSEMLVKKLQGGTPQEPPNPRMKRASSLNFLNKSVEEPTQPGGTGLSDSRTLSSSSMDLSRRSSLVG

SEQ ID NO: 2682 - protein, 554 aa, Homo sapiens [sequence omitted]

SEQ ID NO: 2683 - protein, 169 aa, Homo sapiens
MLSALPGWGPAHLQRPLLGPASCLGILRPAMTAHSFALPVIIFTTFWGLVGIAGPWFVPKGPNRGVIITMLVATAVCCYLLFSPNSGILQIYRTSNETKTKPRSAMPAPCACRSVDGSLGPSSPWERGPCHLLGWPHPSWLIAILAQLNPLFGPQLKNETIWYVRFLWE

SEQ ID NO: 2684 - protein, 349 aa, Homo sapiens [sequence omitted]

SEQ ID NO: 2685 - protein, 111 aa, Homo sapiens [sequence omitted]

SEQ ID NO: 2686 - protein, 191 aa, Homo sapiens
MVLNLGVHRSQGLRFGNLHLGFRGCMEMPGCPVRSLLQSGAPMGTPARPVWKGNVGPPHRVPTGALPIGTVRRRPPSSRFQNGRSTNNLHRAPGKAADTQRQPMKATTREAVPCGTGAKLPKTMGTHLIHQHGLDVRDGVKGDHFGTLRFDCLAGFRTCMGPVTPLFWPISPIWNDCIYPMAVPPLYLGNN

SEQ ID NO: 2687 - protein, 144 aa, Homo sapiens
MSIFFNCHVGSQKVNRFLEHLRFWIRYAHLYIFSINRYFHIVFQGGCICLRFYQQYVRLVQLVLWFLNILLYEFFLFFFFFFLYFNHSSVCIVFCHGFDLYFPNDDCFFVCLLAICISSCEVCRIFYLSLMSLAYQFVRILYIF

SEQ ID NO: 2688 - protein, 154 aa, Homo sapiens [sequence omitted]

SEQ ID NO: 2689 - protein, 644 aa, Homo sapiens [sequence omitted]

SEQ ID NO: 2690 - protein, 107 aa, Homo sapiens [sequence omitted]

SEQ ID NO: 2691 - protein, 250 aa, Homo sapiens
MQPAMMMFSSKYWARRGFSLDSAVPEEHQLLGSSTLNKPNSGKNDDKGNKGSSKREAATESGKTAVVFSLKNEVGGLVKALRLFQEKRVNMVHIESRKSRRRSSEVEIFVDCECGKTEFNELIQLLKFQTTIVTLNPPENIWTEEEELEDVPWFPRKISELDKCSHRVLMYGSELDADHPGFKDNVYRQRRKYFVDVAMGYKYGPRLLAAIGDWEFQLFSVSSSLSSSSLRMLSVHILMDVRSIVVAVDI

SEQ ID NO: 2692 - protein, 548 aa, Homo sapiens
MKDSGDSKDQQLMVALRVRPISVAELEEGATLIAHKVDEQMVVLMDPMEDPDDILRAHRSREKSYLFDVAFDFTATQEMVYQATTKSLIEGVISGYNATVFAYGPTGCGKTYTMLGTDQEPGIYVQTLNDLFRAIEETSNDMEYEVSMSYLEIYNEMIRDLLNPSLGYLELREDSKGVIQVAGITEVSTINAKEIMQLLMKGNRQRTQEPTAANQTSSRSHAVLQVTVRQRSRVKNILQEVRQGRLFMIDLAGSERASQTQNRGQRMKEGAHINRSLLALGNCINALSDKGSNKYINYRDSKLTRLLKDSLGGNSRTVMIAHISPASSAFEESRNTLTYAGRAKNIKTRVKQNLLNVSYHIAQYTSIIADLRGEIQRLKRKIDEQTGRGQARGRQDRGDIRHIQAEVQLHSGQGEKAGMGQLREQLASAFQEQMDVRRRLLELENRAMEVQIDTSRHLLTIAGWKHEKSRWALKWREEQRKECYAKDDSEKDSDTGDDQPDILEPPEVAAARESIAALVDEQKQLRKQKVSRVWGDKESGFRGQGEQV

SEQ ID NO: 2693 - protein, 109 aa, Homo sapiens
MKKRKRWGKQGRGLGTQGRVLGMQGRVLGTQEGAGDAGEGAGDTGGAGDMGGARDASFPEFPQFSAPLLSHGVWATCGLRLFRAKLISCSSQQRGPLRLLCPPWGTALA

SEQ ID NO: 2694 - protein, 523 aa, Homo sapiens
MSLVSQNARHCSAEITADYGDGRGEIQATNASGSPTSMLVVDAPQCPQAPINSQCVNTSQAVQDPNDLEVLIDEQSRRLGALRVHDPLEDRSIALVNFMRMKSQTEGSIQQSEMLEFLREYSDQFPEILRRASAHLDQVFGLNLRVIDPQADTYNLVSKRGFQITDRIAESLDMPKASLLALVLGHILLNGNRAREASIWDLLLKVDMWDKPQRINNLFGNTRNLLTTDFVCMRFLEYWPVYGTNPLEFEFLWGSRAHREITKMEALKFVSDAHDEEPWSWPEEYNKALEGDKTKERSLTAGLEFWSEDTMNDKANDLVQLAISVTEEMLPIHQDELLAHTGKEFEDVFPNILNRATLILDMFYGLSLIEVDTSEHIYLLVQQPESEEEQVMLESLGRPTQEYVMPILGLIFLMGNRVKEANVWNLLRRFSVDVGRKHSITRKLMRQRYLECRPLSYSNPVEYELLWGPRAHHETIKMKVLEYMARLYRKRPQNWPEQYREAVEDEEARAKSEATIMFFLDPT

SEQ ID NO: 2695 - protein, 207 aa, Homo sapiens
MSEAVRVPSPATPLVVAAAAPEERKGKESEREKLPPIVSAGAGATAGLDRGAKGQISTFSSFISAVSPKKEAAENRSSPAHLVFPNIKNVREPPPICLDVRQKQRTSMDASSSEMKAPVLPEPILPIQPKTVKDFQEDVEKVKSSGDWKAVHDFYLTTFDSFPELNAAFKKDATASFNTIEDSGINAKFVNAVYDTLLNTVSIMTCK

SEQ ID NO: 2696 - protein, 159 aa, Homo sapiens
MNGGTSLHQKCQLKPRGSFFSVALRERPRESHGVFPFQFRSTPRAVTVSPPFLPGEKKVLGVPSAGQRKNSPFFAPVPKGSFCFHFHLSHGRRPAGVQFADPTSPMMPNSILTVSHVALSVLGTGESLWAMILGWTGVPWAPLPPSFPQSMTRQPFPVT

SEQ ID NO: 2697 - protein, 172 aa, Homo sapiens
MAAAGVTAKAGGGTSAAAASLIRARSPAWPRRAVSCSLARGTGAPKCGSDSTPPPPLPRRRSRARRGHLGNGDRPSAGATVGGEGQASQIGGGGGGGGGRRNATGRGRRRRQGGAGSAVKCRRDSVLEPGLASSPGVAPAGGSGGLWSGAGLCSGLGARGFPGGRRSGRDAG

SEQ ID NO: 2698 - protein, 210 aa, Homo sapiens
MGQVPCCWAWWSLLQGRGSWCEHKELRGWRRPGPGACRRTPARGQAGPGACRRTPARGQAGPDSLAGWDLTGAPGSLGRPRNRLFACAFSSVNGMSWTQDPSALPCWRRFLWALGPSHIPQWAGGHQEVQDHALCFDRKLGLRGAWGLCLRPGQVLDVSPSSWLLWLNYVPPNSHVAALTPAPQCGTGFGDGAPTEVSRLKEAIRALGGP

SEQ ID NO: 2699 - protein, 394 aa, Homo sapiens
MIFSNEQQFDPLWKRRNVECLQPLTHLKRRLSYSDSDLKRAENLLEQGETPQTVPAQILVGHKPRQQKLISHCYIPQSPEPDLHKEALVRSTLSFWSQSKFGGLEGLKDNGSPIFHGRIIPKEAQQSGAFSADVSGSHSPGEPVSPSFANVHKDPNPAHQQVSHCQCKTHGVGSPGSVRQNSRTPRSPLDCGSSPKAQFLVEHETQDSKDLSEAASHSALQSELSAEARRILAAKALANLNESVEKEELKRKVEMWQKELNSRDGAWERICGERDPFILCSLMWSWVEQLKEPVITKEDVDMLVDRRADAAEALFLLEKGQHQTILCVLHCIVNLQTIPVDVEEAFLAHAIKAFTKVNFDSENGPTVYNTLKKIFKHTLEEKRKMTKDGPKPGL

SEQ ID NO: 2700 - protein, 188 aa, Homo sapiens
MGTPTQRGEKPQCHPPTAAPSCSPLLTRLPLPHLGHHLSGPSSSGPREADLQLRYLLPALLLHLRLLLPPPWSSPGVAPVRPPTPTWGYWCTAGCTLAPAARACLHPCTWPRGRESTTWLAGCAATRVEEAWPTPLMPTGWGHSCLACSRRTRRAPPLRPAPPPALHPLPPGFGVKAAATAPCASRAK

SEQ ID NO: 2701 - protein, 701 aa, Homo sapiens [sequence omitted]

SEQ ID NO: 2702 - protein, 599 aa, Homo sapiens
MPGIATSERGDEHSLGCSPSNSSAQPSLPLYRTCHPIMPVASSFVLHCPDPVQKTNQCLQGQSLKTSLTLKVDRGSEETYRPEFPSTKGLVRSLAEQFQRMQGVSMRDSTGFKDRSLSGSLRKNSSPSDSKPPFSQGQEKGHWPWAKQQSSLEGGDRPLSWEESTEHSSLALNSGLPNGETSSGGQPRLAEPDIYQEKLSQVRDVRSKDLGSSTDLGTSLPLDSWVNITRFCDSQLKHGAPRPGMKSSPHDSHTCVTYPERNHILLHPHWNQDTEQETSELESLYQASLQASQAGCSGWGQQDTAWPPLSQTGSADGMGRRLHSAHDPGLSKTSTAEMEHGLHEARTVRTSQDSSNVRKPLETGHRCSSSSSLPVIHDPSVFLLGPQLYLPQPQFLSPDVLMPTMAGEPNRLPGTSRSVQQFLAMCDRGETSQGAKYTGRTLNYQSLPHRSRTDNSWAPWSETNQHIGTRFLTTPGCNPQLTYTATLPERSKGLQVPHTQSWSDLFHSPSHPPIVHPVYPPSSSLHVPLRSAWNSDPVPGSRTPGPRRVDMPPDDDWRQSSYASHSGHRRTVGEGFLFVLSDAPRREQIRARVLQHSQW

SEQ ID NO: 2703 - protein, 100 aa, Homo sapiens [sequence omitted]

SEQ ID NO: 2704 - protein, 176 aa, Homo sapiens [sequence omitted]

SEQ ID NO: 2705 - protein, 146 aa, Homo sapiens [sequence omitted]

SEQ ID NO: 2706 - protein, 225 aa, Homo sapiens
MLEAKPKNLELSPEGEEQESLLQPDRPSPEFTFQYDPSYRSVREIREHLRARESAESESWSCSCIQCELKIGSEEFEEFLLLMDKIRDPFIHEISKIAMGMRSASQFTRDFIRDSGVVSLIETLLNYPSSRVRTSFLENMIHMAPPYPNLNMIETFICQVCEETLAHSVDSLEQLTGIRMLRHLTMTIDYHTLIANYMSGFLSLLTTANARTIQCQSSFNICGSL

SEQ ID NO: 2707 - protein, 129 aa, Homo sapiens [sequence omitted]

SEQ ID NO: 2708 - protein, 129 aa, Homo sapiens
MASHPQTRIQAYLEKNKIGPLFEELMTKLITETPDQPIPFLIDHLQSKQGNRGQLQRTLSGSAALWAESEKSESKGTRRDFRSYDKPWQLNAKKPKKSKSDLAVSNISPPSPDSKSCKEVSYSNAIQSM

SEQ ID NO: 2709 - protein, 142 aa, Homo sapiens [sequence omitted]

SEQ ID NO: 2710 - protein, 125 aa, Homo sapiens [sequence omitted]

SEQ ID NO: 2711 - protein, 190 aa, Homo sapiens [sequence omitted]

SEQ ID NO: 2712 - protein, 298 aa, Homo sapiens [sequence omitted]

SEQ ID NO: 2713 - protein, 758 aa, Homo sapiens [sequence omitted]

SEQ ID NO: 2714 - protein, 593 aa, Homo sapiens [sequence omitted]

SEQ ID NO: 2715 - protein, 102 aa, Homo sapiens
MNNVSLDSLYAKVFILNMCPKIYALTDVIKIVQEINLSITYFVCTTVSYSALKWSFITKAWTLLQQSRGLLNSDLRSFVCLSQIIAHSQGNKESWWIEFSDY

SEQ ID NO: 2716 - protein, 201 aa, Homo sapiens
MNLNCPPCVTGLRVWSSCRSKPNSRARSCRSCTGASRTLPSHHMSHVECPSGIVNEENFKQIYSQFFPQGDSSTYATFLFNAFDTNHDGSVSFEDFVAGLSVILRGTVDDRLNWAFNLYDLNKDGCITKEEMLDIMKSIYDMMGKYTYPALREEAPREHVESFFQKMDRNKDGVVTIEEFIESCQKDENIMRSMQLFDNVI

SEQ ID NO: 2717 - protein, 668 aa, Homo sapiens [sequence omitted]

SEQ ID NO: 2718 - protein, 104 aa, Homo sapiens
MHTNITAAHSRPSRCYHEVTPLQASLVCRLAGCLLSSCLRLAPAFAFLATGFLVSAVWIPAKAVCISLLFMCLWFCDGVALILSLFSYPCFSCFLLRMILSSHL

SEQ ID NO: 2719 - protein, 130 aa, Homo sapiens [sequence omitted]

SEQ ID NO: 2720 - protein, 218 aa, Homo sapiens
MHTHKHMCISHTSTHPNTCISHTCTHTNTCISHTCTQTCISHTCTHTQTRAYHTHAHTQTRAYHTQTHVHTYLTHTCTCYAHVHTHVVVCFPATHTLGLHWRLFHPANVNVSRLVGALCYPVGRSHQEQSLPNVHLREEGCRGVFPAPARWKGSPETGTQYLSMRSLTSRGVGKLDRDSVTHSVLLPANPVCPYRSTRRAVGGPPGGSASASPSHLLP

SEQ ID NO: 2721 - protein, 408 aa, Homo sapiens
MTYTEQASKRHYCMRLTCFIRLNDYLIENTMHILTVNAVNSLLNHLTDKLKRTPSADVIQKWITEEKPEVPDKKGTLMVEKQEEDESLIPMFLTELMLTVQSLLFEPSLEDFLDGILGAVNHCQNTVLSVPNLVPDSYFDAFTSPYINNKLEGKTCGTGPSLAAVFEDDKNFHTIISQIKETIQAAFESARIYAATFEKFQIFFKENESLDLQALKLQEPDINFFSEQLEKYHKQHKDAVALRPTRNVGLLLIDTRLLREKLIPSPLRCLEVLNFMLPRQSKKKVDAIIFEAQDAEYKLEFVPTTTTEYVHSLLFLDEIQERIESLEDEGNIVTQMYKLMEQYQVPTPPEDFAVFATMKPSIVAVRNAIDKSVGDRESSIKQFCVHLGSDLEELNNEVNEVKLQAQVS

SEQ ID NO: 2722 - protein, 114 aa, Homo sapiens [sequence omitted]

SEQ ID NO: 2723 - protein, 655 aa, Homo sapiens
MWHEARKHERKLRGVMVDYKKRAERRREYYEKIKKDPAQFLQVHGRACKVHLDSAVALAAESPVNMMPWQGDTNNMIDRFDVRAHLDHIPDYTPPLLTTISPEQESDERKCNYERYRGLVQNDFAGISEEQCLYQIYIDELYGGLQRPSEDEKKKLAEKKASIGYTYEDSTVAEVEKAAEKPEEEESAAEEESNSDEDEVIPDIDVEVDVDELNQEQVADLNKQATTYGMADGDFVRMLRKDKEEAEAIKHAKALEEEKAMYSGRRSRRQRREFREKRLRGRKISPPSYARRDSPTYDPYKRSPSESSSESRSRSRSPTPGREEKITFITSFGGSDEEAAAAAAAAAASGVTTGKPPAPPQPGGPAPGRNASARRRSSSSSSSSSASRTSSSRSSSRSSSRSRRGGGYYRSGRHARSRSRSWSRSRSRSRRYSRSRSRGRRHSGGGSRDGHRYSRSPARRGGYGPRRRSRSRSHSGDRYRRGGRGLRHHSSSRSRSSWSLSPSRSRSLTRSRSHSPSPSQSRSRSRSRSQGPSPSPAREKLTRPAASPAVGEKLKKTEPAAGKETGAAKVIKADKKAAQEKMIQQEHERQEREDELRAMARKIRMKERERREKEREEWERQYSRQSRSPSPRYSREYSSSRRRSRSRSRSPHYRH

SEQ ID NO: 2724 - protein, 238 aa, Homo sapiens
MPSPWGWFAVTACGAQRNNFEEPVALQEMDTSNGVLLPFYDPDSSIVYLCGKGDSSIRYFEITDEPPFVHYLNTFSSKEPQRGMGFMPKRGLDVSKCEIARFYKLHERKCEPIIMTVPRKSDLFQDDLYPDTPGPEPALEADEWLSGQDAEPVLISLRDGYVPPKHRELRVTKRNILDVRPPSGPRRSQSASDAPLSQQHTLETLLEEIKALRERVQAQEQRITALENMLCELVDGTD

SEQ ID NO: 2725 - protein, 807 aa, Homo sapiens [sequence omitted]

SEQ ID NO: 2726 - protein, 353 aa, Homo sapiens
MQAHRLQKVTDQYGDIWTLHDGGFRNYNTSIDMQRGKLDDIMEHPEKSDKDSSSAYNTAESCRSTPLTVDRSPDSSLPRVINLTNKKNLRSTMAATQSSSGQSSKESTSTKAKTTEQGCSAESKEKVLEGSKLPDQEKAVSEHIPYLSPYHSSSYRYANIPAHARHYQSYMQLIQQKSAVEYAQSQLSLVSMCKESQKCSEPKMEWKVKIRSDGTRYITKRPVRDRILKERALKIKEERSGMTTDDDTMSEMKMGRYWSKEERKQHLVRAKEQRRRREFMMRSRLECLKESPQSGSEGKKEINIIELSHKKMMKKRNKKILDNWMTIQELMTHGAKSPDGTRVHNAFLSVTTV

SEQ ID NO: 2727 - protein, 104 aa, Homo sapiens [sequence omitted]

SEQ ID NO: 2728 - protein, 118 aa, Homo sapiens [sequence omitted]

SEQ ID NO: 2729 - protein, 146 aa, Homo sapiens
MGKDFMSKTPKAMAAKAKIDKWDLFKLKSFCTAKETIIRMNRQPTKWEKIFAIYSSDKGLISRIYKELKQIHKKKVNNTFKKWVKDMNRHFSKEDIYAANRHMKKCSTSLAIREMQIKTTMRYHLTPVRMAIIKKSGNSAGEDVEK

SEQ ID NO: 2730 - protein, 101 aa, Homo sapiens
MRAAPRGTSRRRRPTEQVISPPAPGPGLGESRRALTQGTRPMCSPTVPPPGPVGPPSLILAVACIKAHPVCSGLPRHVSSKATAASLCLRAHYSGRLRVSR

SEQ ID NO: 2731 - protein, 118 aa, Homo sapiens [sequence omitted]

SEQ ID NO: 2732 - protein, 172 aa, Homo sapiens
MVLTWPPCAFPKGRPELTPTAIMAGRLLVQRLFGGSSDLMDYDNVPTTVFTPLEYGCVGLSEEEAVARHGQEHVEVYHAHYKPLEFTVAGRDASQCYVKMVCLREPPQLVLGLHFLGPNAGEVTQGFALGIKCGASYAQVMRTVGIHPTCSEEVVKLRISKRSGLDPTVTGC

SEQ ID NO: 2733 - protein, 859 aa, Homo sapiens
MKIGSGFLSGGGGTGSSGGSGSGGGGSGGGGGGGSSGRRAEMEPTFPQAPAAEPPPPPAPDMTFKKEPAASAAAFPSQRTSWGFLQSLVSIKQEKPADPEEQQSHHHHHHHHYGGLFAGAEERSPGLGGGEGGSHGVIQDLSILHQHVQQQPAQHHRDVLLSSSSRTDDHHGTEEPKQDTNVKKAKRPKPESQGIKAKRKPSASSKPSLVGDGEGAILSPSQKPHICDHCSAAFRSSYHLRRHVLIHTGERPFQCSQCSMGFIQKYLLQRHEKIHSREKPFGCDQCSMKFIQKYHMERHKRTHSGEKPYKCDTCQQYFSRTDRLLKHRRTCGEVIVKGATSAEPGSSNHTNMGNLAVLSQGNTSSSRRKTKSKSIAIENKEQKTGKTNESQISNNINMQSYSVEMPTVSSSGGIIGTGIDELQKRVPKLIFKKGSRKNTDKNYLNFVSPLPDIVGQKSLSGKPSGSLGIVSNNSVETIGLLQSTSGKQGQISSNYDDATQFSKKRRYLPTASSNSAFSINVGHMVSQQSVIQSAGVSVLDNEAPLSLIDSSALNAEIKSCHDKSGIPDEVLQSILDQYSNKSESQKEDPFNIAEPRVDLHTSGEHSELVQEEDLSPGTQTPSNDKASMLQEYSKYLQQAFEKSTNASFTLGHGFQFVSLSSPLHNHTLFPEKQIYTTSPLECGFGQSVTSVLPSSLPKPPFGMLFGSQPGLYLSALDATHQQLTPSQELDDLIDSQKNLETSSAFQSSSQKLTSQKEQKHLESSTGFQIPSQELASQIDPQKDIEPRTTYQIENFAQAFGSQFKSGSRVPMTFITNSNGEVDHRVRTSVSDFSGYTNMMSDVSEPCSTRVKTPTSQSYR

SEQ ID NO: 2734 - protein, 247 aa, Homo sapiens [sequence omitted]

SEQ ID NO: 2735 - protein, 219 aa, Homo sapiens
MRGQRLPLDIQIFYCARPDEEPFVKIITVEEAKRRKSTCSYYEDEDEEVLPVLRPHSALLENMHIEQLARRLPARVQGYPWRLAYSTLEHGTSLKTLYRKSASLDSPVLLVIKDMDNQIFGAYATHPFKFSDHYYGTGETFLYTFSPHFKVFKWSGENSYFINGDISSLELGGGGGRFGLWLDADLYHGRSNSCSTFNNDILSKKEDFIVQDLEVWAFD

SEQ ID NO: 2736 - protein, 157 aa, Homo sapiens [sequence omitted]

SEQ ID NO: 2737 - protein, 107 aa, Homo sapiens
MERYIERDGFTLSPRLECSGEIKAHCSLQLLGSNDPPNPASLVAGTTGACHHAWLIFFFFLRLGSHCVVQADLELLALSKPPVLASQHAGIIGISHCSQPTYILISL

SEQ ID NO: 2738 - protein, 664 aa, Homo sapiens
MEGFMDSGTQTDAVVVLSLAQAAVLGLVSENELFGATISAEAFYPDLGPELSGAAMGEPEPPGPDVYQLACNGRALEEPAEEEVLEVEAACEKHTRRKTRPPVRLVPKVKFEKVEEEEQEVYEVSVPGDDKDAGPAEAPAEAASGGCDALVQSSAVKMIDLSAFSRKPRTLRHLPRTPRPELNVAPYDPHFPAPARDGFPEPSMALPGPEALPTECGFEPPHLAPLSDPEAPSMESPEPVKPEQGFVWQEASEFEADTAGSTVERHKKAQLDRLDINVQIDDSYLVEAGDRQKRWQCRMCEKSYTSKYNLVTHILGHNGIKPHSCPHCSKLFKQPSHLQTHLLTHQGTRPHKCQVCHKAFTQTSHLKRHMLLHSEVKPYSCHFCGRGFAYPSELKAHEVKHESGRCHVCVECGLDFSTLTQLKRHLASHQGPTLYQCLECDKSFHYRSQLQNHMLKHQNVRPFVCTECGMEFSQIHHLKQHSLTHKGVKEFKCEVCGREFTLQANMKRHMLIHTSVRPYQCHICFKTFVQKQTLKTHMIVHSPVKPFKCKVCGKSFNRMYNLLGHMHLHAGSKPFKCPYCSSKFNLKGNLSRHMKVKHGVIDIGLDSQDPMMELTGTDPSELDGQQEMEDFEENAYSYASVDSSAEASVLTEQAMKEMAYYNVL

SEQ ID NO: 2739 - protein, 945 aa, Homo sapiens
MELSCSEAPLYGQMMIYAKFDKNVYLPEDAEFYFTYDGSHQRHVMIAERIEDNVLQSSVPGHGLQETVTVSVCLCSEGYSPVTMGSGSVTYVDNMACRLARLLVTQANRLTACSHQTLLTPFALTAGALPALDEELVLALTHLELPLEWTVLGSSSLEVSSHRESLLHLAMRWGLAKLSQFFLCLPGGVQALALPNEEGATPLDLALREGHSKLVEDVTNFQGRWSPSFSRVQLSEEASLHYIHSSETLTLTLNHTAEHLLEADIKLFRKYFWDRAFLVKAFEPEARPEERTAMPSSGAETEEEIKNSVSSRSAAEKEDIKRVKSLVVQHNEHEDQHSLDLDRSFDILKKSKPPSTLLAAGRLSDMLNGGDEVYANCMVIDQVGDLDISYINIEGITATTSPESRGCTLWPQSSKHTLPTETSPSVYPLSENVEGTAHTEAQQSFMSPSSSCASNLNLSFGWHGFEKEQSHLKKRSSSLDALDADSEGEGHSEPSHICYTPGSQSSSRTGIPSGDELDSFETNTEPDFNISRAESLPLSSNLQSKESLLSGVRSRSYSCSSPKISLGKTRLVRELTVCSSSEEQRAYSLSEPPRENRIQEEEWDKYIIPAKSESEKYKVSRTFSFLMNRMTSPRNKSKTKSKDAKDKEKLNRHQFAPGTFSGVLQCLVCDKTLLGKESLQCSNCNANVHKGCKDAAPACTKKFQEKYNKNKPQTILGNSSFRDIPQPGLSLHPSSSVPVGLPTGRRETVGQVHPLSRSVPGTTLESFRRSATSLESESDHNSCRSRSHSDELLQSMGSSPSTESFIMEDVVDSSLWSDLSSDAQEFEAESWSLVVDPSFCNRQEKDVIKRQDVIFELMQTEMHHIQTLFIMSEIFRKGMKEELQLDHSTVDKIFPCLDELLEIHRHFFYSMKERRQESCAGSDRNFVIDRIGDILVQQFSEENAS

SEQ ID NO: 2740 - protein, 592 aa, Homo sapiens
MDPLPYHKGRRPVRQPSVSRALAQCPGRIGSHAGLKDECKVHSVQFMEFSEVENQDDYYSTEAGCIHTQDQQGVHVMYEEALSDLKELEAELLLVASHYIEKERGHKVGSQPKSGQEWGWAHADVDRFAVLYDTWTWEAALLENKRQLLDSYFEAYQHTLDPEERFTLAQVMTDIVHRRPRFDLSHPYFIKAYQEECTCLRLHLQLVRGILNQQIERQREYVQRLWREDHLDNSNTFGLPLNIVCKQLISINNSCPASKNVYLLEFHPSLSLAALIPKALEHLFQEACHACRPTSASGLASLERHVLQLALDLWLTPATPEAWYSTQLQKDLFSAKVMGDPFLVGEIGLLAFKSAADEGQKQGQDSHVLLLEMFSKLLELLTLRHRLIEMSLESAHLARLYKELAWEMGFEEFHLYLRPVHFEFASHGDRADQPPPVFITSLLEDSGRVDRYSPTALVLAISEVDDNQIGKFSFYTKEAILKLLLHSGVENMQVTLACQAAQKNALMAAVQQVYFYCTPQGSCPANVKVSLHDREARGISSPPPANVRLPLSSFLFSLLPFSLSFSPAPYFLFPISLSSLLSFFLPFLVSCL

SEQ ID NO: 2741 - protein, 116 aa, Homo sapiens [sequence omitted]

SEQ ID NO: 2742 - protein, 558 aa, Homo sapiens
MGKIENNERVILNVGGTRHETYRSTLKTLPGTRLALLASSEPPGDCLTTAGDKLQPSPPPLSPPPRAPPLSPGPGGCFEGGAGNCSSRGGRASDHPGGGREFFFDRHPGVFAYVLNYYRTGKLHCPADVCGPLFEEELAFWGIDETDVEPCCWMTYRQHRDAEEALDIFETPDLIGGDPGDDEDLAAKRLGIEDAAGLGGPDGKSGRWRRLQPRMWALFEDPYSSRAARFIAFASLFFILVSITTFCLETHEAFNIVKNKTEPVINGTSVVLQYEIETDPALTYVEGVCVVWFTFEFLVRIVFSPNKLEFIKNLLNIIDFVAILPFYLEVGLSGLSSKAAKDVLGFLRVVRFVRILRIFKLTRHFVGLRVLGHTLRASTNEFLLLIIFLALGVLIFATMIYYAERVGAQPNDPSASEHTQFKNIPIGFWWAVVTMTTLGYGDMYPQTWSGMLVGALCALAGVLTIAMPVPVIVNNFGMYYSLAMAKQKLPRKRKKHIPPAPQASSPTFCKTELNMACNSTQSDTCLGKDNRLLEHNRSDNCKEVVITGYTQAEARSLT

SEQ ID NO: 2743 - protein, 128 aa, Homo sapiens
MAWRVPGVRPASTFFPQVLRASSELPNRLPEGSTVGPKPDSSWEAGSQGNWGLTSSGAGQDSSAQKLGILSVQISLKIWTWEKPSGWGHLHAAVTGASCCSPLSQGGAICLVTAPQDKPDCSPCTSGH

SEQ ID NO: 2744 - protein, 118 aa, Homo sapiens
MHCATWGSHCPSLGLAFPIFDRTWLCLATPPPMGEFLGLPLSWLQLRCQSQPCPSQEQWARQGQSPPVPGGSTHGPGLFSALADGVRRGFSTPSTMTALDHCPAVTRGTCLPQNISCP

SEQ ID NO: 2745 - protein, 164 aa, Homo sapiens
MNCAAVLRVSSLEPGTENCFIQKSDDKVTLEERLDKACEPGVDYVYKTRLVKVQLSNDFDEYIMAIEQTIKSGSDEVQVGQQRTFISPIKCREALKLEEKKHYLMWGLSSDFWGEKPNLSYIIGKDTWVEHWPEEDECQDEENQKQCQDLGAFTESMVVFGCPN

SEQ ID NO: 2746 - protein, 110 aa, Homo sapiens [sequence omitted]

SEQ ID NO: 2747 - protein, 104 aa, Homo sapiens
MRSSHSTASSRASASTWPHWEPGPDLGLLEKVSPLGTLKDRLVGFVVDFIYSCPNPVFLVSIRPRGRCKEFANRACMTYFLGHGKLFLPPFYPLLQPELPSFFS

SEQ ID NO: 2748 - protein, 203 aa, Homo sapiens [sequence omitted]

SEQ ID NO: 2749 - protein, 184 aa, Homo sapiens
MLKKMGEAVARVARKVNETVESGSDTLDLAECKLVSFPIGIYKVLRNVSGQIHLITLANNELKSLTSKFMTTFSQLRELHLEGNFLHRLPSEVSALQHLKAIDLSRNQFQDFPEQLTALPALETINLEENEIVDVPVEKLAAMPALRSINLRFNPLNAEVRVIAPPLIKFDMLMSPEGARAPLP

SEQ ID NO: 2750 - protein, 431 aa, Homo sapiens
MSYTGFVQGSETTLQSTYSDTSAQPTCDYGYGTWNSGTNRGYEGYGYGYGYGQDNTTNYGINQRLDMVPHLETDMMQGGVYGSGGERYDSYESCDSRAVLSERDLYRSGYDYSELDPEMEMAYEGQYDAYRDQFRMRGNDTFGPRAQGWARDARSGRPMASGYGRMWEDPMGARGQCMSGASRLPSLFSQNIIPEYGIFQGMRGGGAFPGGSRFGFGFGNGMKQMRRTWKTWTTADFRTKKKKRKQGGSPDEPDSKATRTDCSDNSDSDNDEGTEGEATEGLEGTEAVEKGSRVDGEDEEGKEDGREEGKEDPEKGALTTQDENGQTKRKLQAGKKSQDKQKKRQRDRMVERAPALALASSASDSCSCWTFLSLAGARPLGSPDKADPVAQIRTSGRGSSLCVLCANTGPSMRTRWPAILTASSTRNTLST

SEQ ID NO: 2751 - protein, 547 aa, Homo sapiens
MTKTDPAPMAPPPRGEEEEEEEEDEPVPEAPSPTQERRQKPVVHPSAPAPLPKDYAFTFFDPNDPACQEILFDPQTTIPELFAIVRQWVPQVQHKIDVIGNEILRRGCHVNDRDGLTDMTLLHYACKAGAHGVGDPAAAVRLSQQLLALGADVTLRSRWTNMNALHYAAYFDVPDLVRVLLKGARPRVVNSTCSDFNHGSALHIAASSLCLGAAKCLLEHGANPALRNRKGQVPAEVVPDPMDMSLDKAEAALVAKELRTLLEEAVPLSCALPKVTLPNYDNVPGNLMLSALGLRLGDRVLLDGQKTGTLRFCGTTEFASGQWVGVELDEPEGKNDGSVGGVRYFICPPKQGLFASVSKISKAVDAPPSSVTSTPRTPRMDFSRVTGKGRREHKGKKKTPSSPSLGSLQQRDGAKAEVGDQVLVAGQKQGIVRFYGKTDFAPGYWYGIELDQPTGKHDGSVFGVRYFTCPPRHGVFAPASRIQRIGGSTDSPGDSVGAKKVHQVTMTQPKRTFTTVRTPKDIASENSISRLLFCCWFPWMLRAEMQS

SEQ ID NO: 2752 - protein, 163 aa, Homo sapiens
MFFSEARARSRTWEASPSEHRKWVEVFKACDEDHKGYLSREDFKTAVVMLFGYKPSKIEVDSVMSSINPNTSGILLEGFLNIVRKKKEAQRYRNEVRHIFTAFDTYYRGFLTLEDFKKAFRQVAPKLPERTVLEVFREVDRDSDGHVSFRDFEYALNYGQKEA

SEQ ID NO: 2753 - protein, 100 aa, Homo sapiens
MLMERKTGILGEANLSTFVRKDTKFLSNSGFLILLITSIKDGVHITMGCDSPPQHCIVSSFSLRIYFSTISFNLIWGINTFAEGEKENIHYEAFPKLGAW

SEQ ID NO: 2754 - protein, 341 aa, Homo sapiens
MRLCLIPRNTGTPQRVLRPVVWSPPSRKKPVLSPHNSIMFGHLSPVRIPCLRGKFNLQLPSLDDQVIPARLPKTEVSAEEPKEATEVKDQVETQGQEDNKRGPCSNGEAASTSRPLETQGNLTSSWYNPRPLEGNVHLKSLTEKNQTDKAQVHAVSFYSKGHGVASSHSPAGGILPFGKPDPLPTVLPAPVPGCSLWPEKAALKVLGEDHLPSSPGLLMVGEDMQPKDPAALGSSRSSPPRAAGHRSHKRKLSGPPLQLQPTPPLQLRCDRDERPPPAKLPCLSPEALLVGQASQREGRLQHGNMRKNMRVLSRISKFRRLRQLLRRRKKTRQGRRGGSCL

SEQ ID NO: 2755 - protein, 118 aa, Homo sapiens [sequence omitted]

SEQ ID NO: 2756 - protein, 343 aa, Homo sapiens
MVSSQQVNSSEKLQLQECLWADSLGPLKDDVLLLETRGPQDNRSLCALEPSGCTSLPSKASTRAARLGEYLLQDLQSGQCLQLWDDDLGALWACPMDKYIHKRWALVWLACLLFAAALSLILLLKKDHAKAAARGRAALLLYSADDSGFERLVGALASALCQLPLRVAVDLWSRRELSAQGPVAWFHAQRRQTLQEGGVVVLLFSPGAVALCSEWLQDGVSGPGAHGPHDAFRASLSCVLPDFLQGRAPGSYVGACFDRLLHPDAVPALFRTVPVFTLPSQLPDFLGALQQPRAPRSGRLQERAEQVSRALQPALDSYFHPPGTPAPGRGVGPGAGPGAGDGT

SEQ ID NO: 2757 - protein, 177 aa, Homo sapiens
MNFDFPFKKGSGIPLLTTNLSPQCLSLLHAMVAYDPDERIAAHQALQHPYFQEQRKTEKRALGSHRKAGFPEHPVAPEPLSNSCQISKEGRKQKQSLKQEEDCPKRRGPAYVMELPKLKLSGVVRLSSYSSPTLQSVLGSGTNGRVPVLRPLKCIPASKKIRRRTLSLPRSSVACPP

SEQ ID NO: 2758 - protein, 384 aa, Homo sapiens
MQTVLCTIICNLTVTAAVTACLREPGAVSNPGLTSFTVLCVNWQGEKRRLGNERGYSSHQWPQKHPYHLLPELPTQISSSRPTRPRRCKSSSRPHLARGRRSPLKAAQQDRGLPAWGVWLLSRAEVRPRSALGSSRRGLGDKGPRSRRAAEFTQARPTRKRRTPGGGRPEAGCWLENRRQRRRKAGAERAGAGPTLTPPLPAGSPDPPSPAATAAPQPEQRPHLSRGQWRLLPRRRPERAAGSAGSCSSRRALPASGSGAAMTGSWAAPPRPAWAGLGPFWHLRRSRRQDGLCCPGPRPPSSTVASHCKKAWIRNLIRATLLCEARRLRTSGLVPKSLSRGQALWEHGLPATHPVRMQCPRHHLELIIAKYVSTLMLDFPTSRP

SEQ ID NO: 2759 - protein, 109 aa, Homo sapiens
MKSSLSIFFFFFCAFAVTYKKLLANLRSQKFTSMFSSKSFIVLALTSTTYFELVFVYDVRKGSSFILLRVDIQLSSVRLLNRLFFPHQAVLVPSSFPVFFTLVIFYALS

SEQ ID NO: 2760 - protein, 157 aa, Homo sapiens
METAVRGMPLECPPRPERLNAYEREVMVNMLNSLSRNQQLPRITPRCGCVDPLPGRLPFHGYESACSGRHYCLRGMDYYASGAPCTDRRLRPWCREQPTVRFAGLRPPQPGSTPHKPRPRTPPPSSPASFRAGPQPALAPRCTLSRPCRVPPSGSKA

SEQ ID NO: 2761 - protein, 504 aa, Homo sapiens
MSEKQMKEAFVSNLNGTTVLEITQGLCFPAFCILCRGFLIIFSQYLCSFSPTWKTRFLTDFVVLIVPMVATLTIWASFILLELLGVIIFGAGLLYQIYRRRTCYARLPFLKILEKFLNISLESEYDPAISCFRVITSAFTAIAILAVDFPLFPRRFAKTELYGTGAMDFGVGGFVFGSAMVCLEVRRRKYMEGSKLHYFTNSLYSVWPLVFLGIGRLAIIKSIGYQEHLTEYGVHWNFFFTIIVVKLITPLLLIIFPLNKSWIIALGITVLYQLALDFTSLKRLILYGTDGSGTRVGLLNANREGIISTLGYVAIHMAGVQTGLYMHKNRSHIKDLIKVACFLLLAAISLFISLYVVQVNVEAVSRRMANLAFCIWIVASSLILLSSLLLGDIILSFAKFLIKGALVPCSWKLIQSPVTNKKHSESLVPEAERMEPSLCLITALNRKQLIFFLLSNITTGLINLMVDTLHSSTLWALFVVNLYMFSNCLIVYVLYLQDKTVQFW

SEQ ID NO: 2762 - protein, 531 aa, Homo sapiens
MSAVSQPQAAPSPLEKSPSTAILCNTCGNVCKGEVLRVQDKYFHIKCFVCKACGCDLAEGGFFVRQGEYICTLDYQRLYGTRCFSCDQFIEGEVVSALGKTYHPDCFVCAVCRLPFPPGDRVTFNGKECMCQKCSLPVSVGSSAHLSQGLRSCGGCGTEIKNGQALVALDKHWHLGCFKCKSCGKLLNAEYISKDGLPYCEADYHAKFGIRCDSCEKYITGRVLEAGEKHYHPSCALCVGCGQMFAEGEEMYLQGSSIWHPACRQAARTEDRNKETRTSSESIISVPASSTSGSPSRVIYAKLGGEILDYRGLAALPKSKAIYDIDRPDMISYSPYISHSAGDRQSYGESPQLLSPTPTEGDQDDRSYKQCRTSSPSSTGSVSLGRYTPTSRSPQHYSRPAARRSDGEDGSLDQDNRKKSSWLMLKGDADTRTNSPDLDTQSLSHSSGTDRDPLQRMAGDSFHSQYKIYPYDSLIVTNRIRVKLPKDVDRTRLERHLSPEEFQEVFGMSIEEFDRLALWKRNDLKKKALLF

SEQ ID NO: 2763 - protein, 115 aa, Homo sapiens
MGFNIGVRLIEDFLARSNVGRCHDFRETADVIAKVAFKMYLGITPSITNWSPAGDEFSLILENNPLVDFVELPDNHSSLIYSNLLCGVLRGALEMVSATLYLLGHPKCNRDLISV

SEQ ID NO: 2764 - protein, 385 aa, Homo sapiens
MDLLPTSILLASLWICSHLHPPGVSVDLPPTSILLVSLWICSHLHPPGVSVDRPPPPSSWCLCGSPPTSILLVSLWICSPPPSSWCLCGSAPTSILLVSLWIWRLWGLTEGESWFFRWLPGKKKTEAYLPDDKNKSIVWDEKKNQWVNLNEPEEEKKAPPPPPTSMPKTVQAAPPALPGPPGAPVNMYSRRAAGTRARYVDVLNPSGTQRSEPALAPADFVAPLAPLPIPSNLFVPTPVSSVRPQGRSGRNDGLLALSSPDAEEPQLPDGTGREGPAAARGLANPEPAPEPKVLSSAASLPGSELPSSRPEGSQGGELSRCSSMSSLSREVSQHFNQAPGDLPAAGGPPSGAMPFYNPAQLAQACATSGSSRLGRIGQRKHLVLN

SEQ ID NO: 2765 - protein, 439 aa, Homo sapiens
MVPSSPRALFLLLLILACPEPRASQNCLSKQQLLSAIRQLQQLLKGQETRFAEGIRHMKSRLAALQNSVGRVGPDALPVSCPALNTPADGRKFGSKYLVDHEVHFTCNPGFRLVGPSSMVCLPNGTWTGEQPHCRGISECSSQPCQNGGTCVEGVNQYRCICPPGRTGNRCQHQAQTAAPEGSVAGDSAFSRAPRCAQVERAQHCSCEAGFHLSGAAGDSVCQDVNECELYGQEGRPRLCMHACVNTPGSYRCTCPGGYRTLADGKSCEDVDECVGLQPVCPQGTTCINTGGSFQCVSPECPEGSGNVSYVKTSPFQCERNPCPMDSRPCRHLPKTISFHYLSLPSNLKTPITLFRMATASAPGRAGPNSLRFGIVGGNSRGHFVMQRSDRQTGDLILVQNLEGPQTLEVDVDMSEYLDRSFQANHVSKVTIFVSPYDF

SEQ ID NO: 2766 - protein, 352 aa, Homo sapiens
MERDHRNPDEQARQFLILKNQTPIEERGDLFGKALNLNTDFVSLRQVPYKYDLYEKTLKYNSDLLNSNRSYAGKQTDECNEFGKALLYLKQEKTHSGVEYSEYNKSGKALSHKAAIFKHQKIKNLVQPFICTYCDKAFSFKSLLISHKRIHTGEKPYECNVCKKTFSHKANLIKHQRIHTGEKPFECPECGKAFTHQSNLIVHQRAHMEKKPYECSECGKTFAQKFELTTHQRIHTGERPYECNECAKTFFKKSNLIIHQKIHTGEKRYECSECGKSFIQNSQLIIHMRTHTGEKPYECTECGKTFSQRSTLRLHLRIHTGEKPYECSECGKAFSRKSRLSVHQRVHIGEKP

SEQ ID NO: 2767 - protein, 522 aa, Homo sapiens
MAVSHLPTMVQESVTFKDVAILFTQEEWGQLSPAQRALYRDVMLENYSNLVSLGLLGPKPDTFSQLEKREVWMPEDTPGGFCLDWMTMPASKKSTVKAEIPEEELDQWTIKERFSSSSHWKCASLLEWQCGGQEISLQRVVLTHPNTPSQEYDESGSTMSSSLHSDQSQGFQPSKNAFECSECGKVFSKSSTLNKHQKIHNEKNANQKIHIKEKRYECRECGKAFHQSTHLIHHQRIHTGEKPYECKECGKAFSVSSSLTYHQKIHTGEKPFECNLCGKAFIRNIHLAHHHRIHTGEKPFKCNICEKAFVCRAHLTKHQNIHSGEKPYKCNECGKAFNQSTSFLQHQRIHTGEKPFECNECGKAFRVNSSLTEHQRIHTGEKPYKCNECGKAFRDNSSFARHRKIHTGEKPYRCGLCEKAFRDQSALAQHQRIHTGEKPYTCNICEKAFSDHSALTQHKRIHTREKPYKCKICEKAFIRSTHLTQHQRIHTGEKPYKCNKCGKAFNQTANLIQHQRHHIGEK

SEQ ID NO: 2768 - protein, 139 aa, Homo sapiens
MGPGSGSSWLAPASWCCWPPPCFSLFFVFLSHKRPGACRGRPLLDRRAAREEPVPNRRALAGLQGADLPLLPGSLPGLLSDSLPSLLRVPAHIQAASRPGCQTERRSCAELTRGGGGRQGSRHRKAKQRKRHCSHRSWS

SEQ ID NO: 2769 - protein, 229 aa, Homo sapiens [sequence omitted]

SEQ ID NO: 2770 - protein, 192 aa, Homo sapiens
MVGVGWGDPGVSPSFTRPGCGGAGGTAHERGCRKVTQGWGCARSQPGGVGGMDGDTSRAPTPPASGLPNPAGARFSPPRPAASLLPATPLPLGLGLSLLVPHPSRIWPLQGQLPTLPSPKLRQDLLPGSALTVGTALCGGERPQLPPAPEAMAGAGCLGDAEDAKREGLPARKEWFLEQTKEGNTARIHGRG

SEQ ID NO: 2771 - protein, 851 aa, Homo sapiens [sequence omitted]

SEQ ID NO: 2772 - protein, 314 aa, Homo sapiens
MSSTAAFYLLSTLGGYLVTSFLLLKYPTLLHQRKKQRFLSKHISHRGGAGENLENTMAAFQHAVKIGTDTLELDCHITKDEQVVVSHDENLKRATGVNVNISDLKYCELPPYLGKLDVSFQRACQCEGKDNRIPLLKEVFEAFPNTPINIDIKVNNNVLIKKVSELVKRYNREHLTVWGNANYEIVEKCYKENSDIPILFSLQRVLLILGLFFTGLLPFVPIREQFFEIPMPSIILKLKEPHTMSRSQKFLIWLSDLLLMRKALFDHLTARGIQVYIWVLNEEQEYKRAFDLGATGVMTDYPTKLRDFLHNFSA

SEQ ID NO: 2773 - protein, 101 aa, Homo sapiens
MGFFKVGFVLPPPPPMAAPFPNLQNQTMTHLMPNDKSKVPVVEIGDLRQTIAIKTGYKNVNAWLKLIKYSVHTLNKGNFYACAHDRPEAQIVPFPLGWPSS

SEQ ID NO: 2774 - protein, 179 aa, Homo sapiens [sequence omitted]

SEQ ID NO: 2775 - protein, 140 aa, Homo sapiens
MWQKELNSRDGAWERICGERDPFILCSLMWSWVEQLKEPVITKEDVDMLVDRRADAAEALFLLEKGQHQTILCVLHCIVNLQTIPVDVEEAFLAHAIKAFTKVNFDSENGPTVYNTLKKIFKHTLEEKRKMTKDGPKPGL

SEQ ID NO: 2776 - protein, 114 aa, Homo sapiens [sequence omitted]

SEQ ID NO: 2777 - protein, 378 aa, Homo sapiens
MKDVPGFLQQSQNSGPGQPAVWHRLEELYTKNFMKTLSVNLNTGKSLSSVFHFENECIDARRCSKAGGFYFRVNPLSLVEIILHVVRQMTDPNVALTFLEKTREKVKSSDEAVILCKTAIGALKLNIGDLQVTKETIEDVEEMLNNLPGVTSVHSRFYDLSSKYYQTIGNHASYYKDALRFLGCVDIKDLPVSEQQERAFTLGLAGLLGEGVFNFGELLMHPVLESLRNTDRQWLIDTLYAFNSGNVERFQTLKTAWGQQPDLAANEAQLLRKIQLLCLMEMTFTRPANHRQLTFEEIAKSAKITVNEVELLVMKALSVGLVKGSIDEVDKRVHMTWVQPRVLDLQQIKGMKDRLEFWCTDVKSMEMLVEHQAHDILT

SEQ ID NO: 2778 - protein, 126 aa, Homo sapiens
MPLLQGQMTLRVASMTCGQIGRLPSIPKKASYLEHPAWTSPSVVACCLLDTMITLSTSGMFSKGPGSPSCLDMKTALALYEFPPMGLLSALDHGIIPSESGPNHLLTVHSCIPENLKSSHVNRYYF

SEQ ID NO: 2779 - protein, 372 aa, Homo sapiens
MLGATRATGDVLVFMDAHCECHPGWLEPLLSRIAGDRSRVVSPVIDVIDWKTFQYYPSKDLQRGVLDWKLDFHWEPLPEHVRKALQSPISPIRSPVVPGEVVAMDRHYFQNTGAYDSLMSLRGGENLELSFKAWLCGGSVEILPCSRVGHIYQNQDSHSPLDQEATLRNRVRIAETWLGSFKETFYKHSPEAFSLSKAEKPDCMERLQLQRRLGCRTFHWFLANVYPELYPSEPRPSFSGKLHNTGLGLCADCQAEGDILGCPMVLAPCSDSRQQQYLQHTSRKEIHFGSPQHLCFAVRQEQVILQNCTEEGLAIHQQHWDFQENGMIVHILSGKCMEAVVQENNKDLYLRPCDGKARQQWRFDQINAVDER

SEQ ID NO: 2780 - protein, 244 aa, Homo sapiens
MSSRWSRSSQSTDRSLKSVDGRQIRVDQAGKSSDNRSRGYRGGSAGGRGFFRGGRGRGRGFSRGGGDRGYGGNRFESRSGGYGGSRDYYSSRSQSGGYSDRSSGGSYRDSYDSYGKSHSEGATLLWPAVGARFTLVPSPSTLGWTLRPCHCACPEEAHLSSQSHFYRRTQKPNETDQKGKGERGPAGQSARCMCGRRPASLGCGGWLLPGRRPRPGLASGVKLPLVASVPLHCACFLSSATHNE

SEQ ID NO: 2781 - protein, 515 aa, Homo sapiens [sequence omitted]

SEQ ID NO: 2782 - protein, 367 aa, Homo sapiens
MAALRWVQENIAAFGGDPGNVTLFGQSAGAMSISGLMMSPLASGLFHRAISQSGTALFRPFITSNPLKVAKKVAHLAGCNHNSTQILVNCLRALSGTKVMRVSNKMRFLQLNFQRDPEEIIWSMSPVVDGVVIPDDPLVLLTQGKVSSVPYLLGVNNLEFNWLLPYIMKFPLNRQAMRKETITKMLWSTRTLLNITKEQVPLVVEEYLDNVNEHDWKMLRNRMMDIVQDATFVYATLQTAHYHRDAGLPVYLYEFEHHARGIIVKPRTDGADHGDEMYFLFGGPFATGLSMGKEKALSLQMMKYWANFARTGNPNDGNLPCWPRYNKDEKYLQLDFTTRVGMKLKEKKMAFWMSLYQSQRPEKQRQF

SEQ ID NO: 2783 - protein, 139 aa, Homo sapiens
MQREILSILGLPHRPRPHLQGKHNSAPMFMLDLYNAMAVEEGGGPGGQGFSYPYWIIAPEGCAAYYCEGECAFPLNSYMNATNHAIVQTLVHFINPETVPKPCCAPTQLNAISVLYFDDSSNVILKKYRNMVVRACGCH

SEQ ID NO: 2784 - protein, 472 aa, Homo sapiens
MELQDPKMNGALPSDAVGYRQEREGFLPSRGPAPGSKPVQFMDFEGKTSFGMSVFNLSNAIMGSGILGLAYAMAHTGVIFFLALLLCIALLSSYSIHLLLTCAGIAGIRAYEQLGQRAFGPAGKVVVATVICLHNVGAMSSYLFIIKSELPLVIGTFLYMDPEGDWFLKGNLLIIIVSVLIILPLALMKHLGYLGYTSGLSLTCMLFFLVSVIYKKFQLGCAIGHNETAMESEALVGLPSQGLNSSCEAQMFTVDSQMSYTVPIMAFAFVCHPEVLPIYTELCRPSKRRMQAVANVSIGAMFCMYGLTATFGYLTFYSSVKAEMLHMYSQKDPLILCVRLAVLLAVTLTVPVVLFPIRRALQQLLFPGKAFSWPRHVAIALILLVLVNVLVICVPTIRDIFGVIGSTSAPSLIFILPSIFYLRIVPSEVEPFLSWPKIQALCFGVLGVLFMAVSLGFMFANWATGQSRMSGH

SEQ ID NO: 2785 - protein, 205 aa, Homo sapiens
MQNVSWYERNEVEIVMSLLGMFCPPLFETIAALENYHPRTGLKWQLGRIFALFLGNLYTFLLALMDDVHLKLANEETIKNITHWTLFNYYNSSGWNESVPRPPLHPADVPRGSCWETAVGIEFMRLTVSDMLVTYITILLGDFLRACFVRFMNYCWCWDLEAGFVGHHFMDIPHKGISTIFFDTYSQMHSWAFHFFGSLMTVSAL

SEQ ID NO: 2786 - protein, 109 aa, Homo sapiens
MLKLILPSTPPQHQGPWPKPFPGSPSSSHEASFPAPQNSLLYESGQDPTETFPINFIKLIRGEGRGEMEISPACSTHSIGHEVSCSLTHLLRVVCCLLLQSHIDPVTRS

SEQ ID NO: 2787 - protein, 178 aa, Homo sapiens
MLGPQVWSSVRQGLSRSLSRNVGVWASGEGKKVDIAGIYPPVTTPFTATAEVDYGKLEENLHKLGTFPFRGFVVHGSNGEFPFLTSSERLEVVSRVRQAMPKNRLLLAGSGCESTQATVEMTVSMAQVGADAAMVVTPCYYRGRMSSAALIHHYTKVCVRPETKRRLCPGRGDKGSWE

SEQ ID NO: 2788 - protein, 101 aa, Homo sapiens
MGGRPGPREGRNAVPSRRLRWVAAAAPGVCSARGRSERTAPSEQVPAARRAHTLASPQRPKVTTVPGGFALLEKCILTVEFRRRESVNSPYHVDSPVWSRI

SEQ ID NO: 2789 - protein, 154 aa, Homo sapiens
MLSTHGPPTNSGPIFSLSLPCHVWNFSPWLHLEFKSELETQLPITCRWLCTLMVRQLVPWCSLGPCLSQRMCFVYPQPPNISQAYCDGTPTPILTPLPASTIPRPGLGRGVGADLGIEKRRKGSVGNQNWQAHCLLCLLQDPHTSSPHRNCWTH

SEQ ID NO: 2790 - protein, 241 aa, Homo sapiens [sequence omitted]

SEQ ID NO: 2791 - protein, 134 aa, Homo sapiens
MADIEQYYMKPPGSCFWVAVLDGNVVGIVAARAHEEDNTVELLRMSVDSRFRGKGIAKALGRKVLEFAVVHNYSAVVLGTTAVKVAAHKLYESLGFRHMGASDHYVLPGMTLSLAERLFFQVRYHRYRLQLREE

SEQ ID NO: 2792 - protein, 346 aa, Homo sapiens
MFAEGEEMYLQGSSIWHPACRQAARTEDRNKETRTSSESIISVPASSTSGSPSRVIYAKLGGEILDYRDLAALPKSKAIYDIDRPDMISYSPYISHSAGDRQSYGESPQLLSPTPTEGDQDDRSYKQCRTSSPSSTGSVSLGRYTPTSRSPQHYSRPDTGVKDNIYRKPPIYRQHAARRSDGEDGSLDQDNRKQKSSWLMLKGDADTRTNSPDLDTQSLSHSSGTDRDPLQRMAGDSFHSRFPYSKSDPLPGHGKNGLDQRNANLAPCGADPDASWGMREYKIYPYDSLIVTNRIRVKLPKDVDRTRLERHLSPEEFQEVFGMSIEEFDRLALWKRNDLKKKALLF

SEQ ID NO: 2793 - protein, 371 aa, Homo sapiens
MDLPVLSMDLSTVGLNYLEEEITVDVRDEFSGIVSKGDNQILQHHVLTRIHILSFLSGLAECRLGLNDILVKGNEIVLRQDIMPTTTTKWIKLHECRFHGCVDEDVFHNSRVILFNPLDACRFELMRFRTVFAEKTLPFTLRTATSVSGAEVEVQSWLRMSTGFSANRDPLTQVPCENVMIRYPVPSEWVKNFRRESVLGEKSLKAKVNRGASFGSTSVSGSEPVMRVTLGTAKYEHAFNSIVWRINRLPDKNSASGHPHCFFCHLELGSDREVPSRFANHVNVEFSMPTTSASKASVISIAVEDKTDVRKWVNYSAHYSYQTTETDNLPNPLYCSCLPHTDLKRGSKRVVKIRWNASLEVPLASSIRTMV

SEQ ID NO: 2794 - protein, 113 aa, Homo sapiens
MAGVKGTSRSPARLSCGGVATSVPVKPGAAPSARRWGTASPPFPPLRFGRRSTAPFVPWGVGGAAFRGSLGPFCKAAGLPALQWRHQTPPQPEPSARAAPSTSPEFLNKVSTS

SEQ ID NO: 2795 - protein, 104 aa, Homo sapiens
MISFDSISHIQVMLMQEVGSHGLRQLRLCSFAGYSPPPGCFHQLALSVCAFSRCMVQAVSGFMILGSGGQWPTSHSSTTWCPSRDSVWGSLHIFLLHCPSRGSP

SEQ ID NO: 2796 - protein, 116 aa, Homo sapiens [sequence omitted]

SEQ ID NO: 2797 - protein, 392 aa, Homo sapiens
MKWTNFVFQIIALNKTKERMRPYQSNQEDEDPDIKKIKKVQSFMRGWLCRRKWKTIVQDYICSPHAESMRKRNQIVFTMVEAESEYVHQLYILVNGFLRPLRMAASSKKPPISHDDVSSIFLNSETIMFLHEIFHQGLKARIANWPTLILADLFDILLPMLNIYQEFVRNHQYSLQVLANCKQNRDFDKLLKQYEANPACEGRMLETFLTYPMFQIPRYIITLHELLAHTPHEHVERKSLEFAKSKLEELSRVMHDEVSDTENIRKNLAIERMIVEGCDILLDTSQTFIRQGTMKNSNTIIVKHEWGRQLHSDWTLLLSGPDILCSSKEDRSAWPTAVAVPSADDTQAKAQEKLALLKALSHKTGDHVRSENSCLLFPFFISTSGSAPHDII

SEQ ID NO: 2798 - protein, 688 aa, Homo sapiens
MSSESTWDAWNERLLEIEKEASRRYHAKSKREEATDRSSEAGSRVREDDEDSVGSEASSFYNFCSRNKDKLTALERWKIKRIQFGFHKKDLGAGDSSGEPGAEEAVGEKNPSDVSLTAYQAWKLKHQKKVGSENKEEVVELSKGEDSALAKKRQRRLELLERSRQTLEESQSMASWEADSSTASGSIPLSAFWSADPSVSADGDTTSVLSTQSHRSHLSQAASNIAGCSTSNPTTPLPNLPVGPGDTISIASIQNWIANVVSETLAQKQNEMLLLSRSPSVASMKAVPAASCLGDDQVSMLSGHSSSSLGGCLLPQSQARPSSDMQSVLSCNTTLSSPAESCRSKVRGTSKPIFSLFADNVDLKELGRKEKEMQMELREKMSEYKMEKLASDNKRSSLFKKKKVKEDEDDGVGDGDEDTDSAIGSFRYSSRSNSQKPETDTCSSLAVCDHYASGSRVGKEMDSSINKWLSGLRTEEKPPFQSDWSGSSRGKYTRSSLLRETESKSSSYKFSKSQSEEQDTSSYHEANGNSVRSTSRFSSSSTREGREMHKFSRSTYNETSSSREESPEPYFFRRTPESSEREESPEPQRPNWARSRDWEDVEESSKSDFSEFGAKRKFTQSFMRSEEEGEKERTENREEGRFASGRRSQYRRSNDREEEEEMDDEAIIAAWRRRQEETRTKLQKRRED

SEQ ID NO: 2799 - protein, 332 aa, Homo sapiens
MLFKGPLAMKQYLPTKRVRFGLKLYVLCESQSGYVWNALVHTGPGMNLKDSADGLKSSRIVLTLVNDLLGQGYCVFLDNFNISPMLFRELHQNRTDAVGTARLNRKQIPNDLKKRIAKGTTVARFCGELMALKWCDGKEVTMLSTFHNDTVIEVNNRNGKKTKRPRVIVDYNENMGAVDSADQMLTSYPSERKRHKVWYKKFFHHLLHITVLNSYILFKKDNPEHTMSHINFRLALIERMLEKHHKPGQQHLRGRPCSDDVTPLRLSGRHFPKSIPATSGKQNPTGRCKICCSQYDKDGKKIRKETRYFCAECDVPLCVVPCFEIYHTKKNY

SEQ ID NO: 2800 - protein, 164 aa, Homo sapiens [sequence omitted]

SEQ ID NO: 2801 - protein, 350 aa, Homo sapiens
MATVGAPRHFCRCACFCTDNLYVARYGLHVRFRGEQQLRRDYGPILRSRGCVSAKDFQQLLAELEQEVERRQRLGQESAARKALIASSYHPARPEVYDSLQDAALAPEFLAVTEYSVSPDADLKGLLQRLETVSEEKRIYRVPVFTAPFCQALLEELEHFEQSDMPKGRPNTMNNYGVLLHELGLDEPLMTPLRERFLQPLMALLYPDCGGGRLDSHRAFVVKYAPGQDLELGCHYDNAELTLNVALGKVFTGGALYFGGLFQAPTALTEPLEVEHVVGQGVLHRGGQLHGARPLGTGERWNLVVWLRASAVRNSLCPMCCREPDLVDDEGFGDGFTREEPATVDVCALT

SEQ ID NO: 2802 - protein, 574 aa, Homo sapiens
MVNTRKSSLRLLGSKSPGPGPGPGAGAEPGATGGSSHFISSRTRSSKTRAASCPAAKAGGSGGAGVTLDEARKVEVDGSLSDSHVSPPAKRTLKQPDSVCKDKSKSRSTGQREEWNLSTGQARLTSQPGATLPNGHSGLSLRSHPLRGEKKGDGDLSCINGDMEVRKSCRSRKNRFESVNQSLLFDQLVNSTAEAVLQEMDNINIRRNRRSGEVERLRMWTDTEFENMDMYSRVKRRRKSLRRNSYGIQNHHEVSTEGEEEESQEEDGDIEVEEAEGEENDRPYNLRQRKAVDRYQAPPIVPAHQKKRENTLFDIHRSPARRSHIRRKKHAIHSSDTTSSDEERFERRKSKSMARARNRCLPMNFRAEDLASGILRERVKVGASLADVDPMNIDKSVRFDSIGGLSHHIHALKEMVVFPLLYPEIFEKFKIQPPRGCLFYGPPGTGKTLVARALANECSQGDKKVAFFMRKGADCLSKWVGESERQLRLLFDQAYLMRPSIIFFDEIDGLAPVRSSRQDQIHSSIVSTLLALMDGLDNRGEIVVIGATNRLDSIDPALRRPGRFDREFLFNLPD

SEQ ID NO: 2803 - protein, 115 aa, Homo sapiens [sequence omitted]

SEQ ID NO: 2804 - protein, 614 aa, Homo sapiens
MEVSGPEDDPFLSQLHQVQCPVCQQMMPAAHINSHLDRCLLLHPAGHAEPAAGSHRAGERAKGPSPPGAKRRRLSESSALKQPATPTAAESSEGEGEEGDDGGETESRESYDAPPTPSGARLIPDFPVARSSSPGRKGSGKRPAAAAAAGSASPRSWDEAEAQEEEEAVGDGDGDGDADADGEDDPGHWDADAAEAATAFGASGGGRPHPRALAAEEIRQMLQGKPLADTMRPDTLQDYFGQSKAVGQDTLLRSLLETNEIPSLILWGPPGCGKTTLAHIIASNSKKHSIRFVTLSATNAKTNDVRDVIKQAQNEKSFFKRKTILFIDEIHRFNKSQQDTFLPHVECGTITLIGATTENPSFQVNAALLSRCRVIVLEKLPVEAMVTILMRAINSLGIHVLDSSRPTDPLSHSSNSSSEPAMFIEDKAVDTLAYLSDGDARAGLNGLQLAVLARLSSRKMFCKKSGQSYSPSRVLITENDVKEGLQRSHILYDRAGEEHYNCISALHKSMRGSDQNASLYWLARMLEGGEDPLYVARRLVRFASAYNNVKACLRNHQGPLPPVPLHLRNAPTRLMKDLGYGKGYKYNPMYSEPVDQEYLPEELRGVDFFKQRRC

SEQ ID NO: 2805 - protein, 110 aa, Homo sapiens [sequence omitted]

SEQ ID NO: 2806 - protein, 540 aa, Homo sapiens
MAEGSQSAPEAGNDMGNDDAIGGNVSKYIVLPTGYCGQPKKGHLIFDACFESGNLGRVDQVSEFEYDLFIRPDTCNPRFRVWFNFTVENVKESQRVIFNIVNFSKTKSLYRDGMAPMVKSTSRPKWQRLPPKNVYYYRCPDHRKNYVMSFAFCFDREEDIYQFAYCYPYTYTRFQHYLDSLQKRNMDYFFREQLGQSVQQRKLDLLTITSPDNLREGAEQKVVFITGRVHPGETPSSFVCQGIIDFLVSQHPIACVLREYLVFKIAPMLNPDGVYLGNYRCSLMGFDLNRHWLDPSPWVHPTLHGVKQLIVQMYNDPKTSLEFYIDIHAHSTMMNGFMYGNIFEDEERFQRQAIFPKLLCQNAEDFSYSSTSFNRDAVKAGTGRRFLGGLLDHTSYCYTLEVSFYSYIISGTTAAVPYTEEAYMKLGRNVARTFLDYYRLNPVVEKVAIPMPRLRNKEIEVQRRKEKSPPYKHPLLRGPASNYPNSKGDKKSSVNHKDPSTPFLKTRSPGRSYGDRSMHFLLGNEINHSSLASKDLWINA

SEQ ID NO: 2807 - protein, 119 aa, Homo sapiens [sequence omitted]

SEQ ID NO: 2808 - protein, 130 aa, Homo sapiens
MELSAVGERVFAAESIIKRRIRKGRIEYLVKWKGWAIKYSTWEPEENILDSRLIAAFEQKERERELYGPKKRGPKPKTFLLKVTWPSPSSIPLSGPQPRHSTGPGREGQIRGRPSGPAFSEGPQLGRGWL

SEQ ID NO: 2809 - protein, 263 aa, Homo sapiens
MLSSKGLTVVDVYQGWCGPCKPVVSLFQKMRIEVGLDLLHFALAEADRLDVLEKYRGKCEPTFLFYAIKDEALSDEDECVSHGKNNGEDEDMVSSERTCTLAIIKPDAVAHGKTDEIIMKIQEAGFEILTNEERTMTEAEVRLFYQHKAGEEAFEKLVHHMCSGPSHLLILTRTEGFEDVVTTWRTVMGPRDPNVARREQPESLRAQYGTEMPFNAVHGSRDREDADRELALLFPSLKFSDKDTEAPQGESSTQPRLKITDLD

SEQ ID NO: 2810 - protein, 108 aa, Homo sapiens [sequence omitted]

SEQ ID NO: 2811 - protein, 163 aa, Homo sapiens
MAPGLLLQSPTPRPSASSVLPPSGSQARWDSDFSLSSGGPASSSVLPLHALRSSGQVVFSESYLSLWLKRVLSGQGPYLLQGQRGPAKRGQTESQMSGREPGMGSERLSLRSGSLTLPVLGTPPSVLFLTSRPVISSAAAFCDLLTLWQAPDMLCPNQFSQCF

SEQ ID NO: 2812 - protein, 240 aa, Homo sapiens
MISAEDCEFIQRFEMKRSPEEKQEMLQTEGSQCAKTFINLMTHICKEQTVQYILTMVDDMLQENHQRVSIFFDYARCSKNTAWPYFLPMLNRQDPFTVHMAARIIAKLAAWGKELMEGSDLNYYFNWIKTQLSSQKLRGSGVAVETGTVSSSDSSQYVQCVAGCLQLMLRVNEYRFAWVEADGVNCIMGVLSNKCGFQLQYQMIFSIWLLAFSPQMCEHLRRYNIIPVLLISFRSLSKRK

SEQ ID NO: 2813 - protein, 129 aa, Homo sapiens
MLSARDRRDRHPEEGVVAELQGFAVDKAFLTSHKGILLETELVTAASQPGASISLTPGSWPALCQPPAHPSVASFPKPSGHLSCPQLPLLRLLLCLLAASPPGDIYSRFQLQQEGLQLDRVTFWDIEEA

SEQ ID NO: 2814 - protein, 183 aa, Homo sapiens
MVRIWTTIMIVLILLLRIGPNKPSLSGRQAPAQAQTSDLVPSLFPLGLWAPGFCTWSSPDEDKRPRKPVPGTGNRDSGTRRRLQDATEQDPRPGNDVASAETAGPPSPSGIRAQDRAPRHRRAPPARMPVAPAPSADGEPLQEQGGGLFHRTRSVYYGLELNTWMKVERLFVEKFHQSFSLDN

SEQ ID NO: 2815 - protein, 464 aa, Homo sapiens
MLIITHREVQREYNLNFSGSSTIQEVKRNVYDLTSIPVRHQLWEGWPTSATDDSMCLAESGLSYPCHRLTVGRRSSPAQTREQSEEQITDVHMVSDSDGDDFEDATEFGVDDGEVFGMASSALRKSPMMPENAENEGDALLQFTAEFSSRYGDCHPVFFIGSLEAAFQEAFYVKARDRKLLAIYLHHDESVLTNVFCSQMLCAESIVSYLSQNFITWAWDLTKDSNRARFLTMCNRHFGSVVAQTIRTQKTDQFPLFLIIMGKRSSNEVLNVIQGNTTVDELMMRLMAAMEIFTAQQQEDIKDEDEREARENVKREQDEAYRLSLEADRAKREAHEREMAEQFRLEQIRKEQEEEREAIRLSLEQALPPEPKEENAEPVSKLRIRTPSGEFLERRFLASNKLQIVFDFVASKGFPWDEYKLLSTFPRRDIPGLSRMGKHACSRSLYIHFMFFILILKTWIISCF

SEQ ID NO: 2816 - protein, 604 aa, Homo sapiens [sequence omitted]

SEQ ID NO: 2817 - protein, 107 aa, Homo sapiens
MLERENESHGSKSCSRARIGTEVACRACLPPHCAMPPIDAFLCLPFSFALVSGKLYQWKEPVISSVHSKVKRTAEVKEEIVEKEMKKLVHSVFNMADYTFPLQVNTW

SEQ ID NO: 2818 - protein, 630 aa, Homo sapiens
MEAVVLPWQIFGVRELPVERGVTMKGPRLFRAPGHVPTGLKCHPDQEHMIYPLGCTVLIQAINTKEQNFLQGHGNNVSCLAISRSGEYIASGQVTFMGFKADIILWDYKNRELLARLSLHKGKIEALAFSPNDLYLVSLGGPDDGSVVVWSIAKRDAICGSPAAGLNVGNATNVIFSRCRDEMFMTAGNGTIRVWELDLPNRKIWPTECQTGQLKRIVMSIGVDDDDSFFYLGTTTGDILKMNPRTKLLTDVGPAKDKFSLGVSAIRCLKMGGLLVGSGAGLLVFCKSPGYKPIKKIQLQGGITSITLRGEGHQFLVGTEESHIYRVSFTDFKETLIATCHFDAVKDIVFPFGTAELFATCAKKDIRVWHTSSNRELLRITVPNMTCHGIDFMRDGKSIISAWNDGKIRAFAPETGRLMYVINNAHRIGVTAIATTSDCKRVISGGGEGEVRVWQIGCQTQKLEEALKEHKSSVSCIRVKRNNEECVTASTDGTCIIWDLVRLRRNQMILANTLFQCVCYHPEEFQIITSGTDRKIAYWEVFDGTVIRELEGSLSGSINGMDITQEGVHFVTGGNDHLVKVWDYNEGEVTHVGVGHSGNITRIRISPGNQYIVSVSADGAILRWKYPYTS

SEQ ID NO: 2819 - protein, 105 aa, Homo sapiens [sequence omitted]

SEQ ID NO: 2820 - protein, 267 aa, Homo sapiens
MATGELGDLGGYYFRFLPQKTFQSLSSKEITSRLRQWSMLGRIKAQAFGFDQTFQSYRKDDSVMAFFKDPNVIPNLKLLSDSSGQWIILGTEVKKIEAINVPCTQLSMSFFHRLYDEDIVRDSGHIVKCLDSFCDPFLISDELRRVLLVEDSEKYEIFSQPDREEFLFCLFKHLCLGGALCQYEDVISPYLETTKLIYKDLVSVRKNPQTKKIQITSSVFKVSAYDSAGMCYPSAKNHEQTFSYFIVDPIRRHLHVLYHCYGVGDMS

SEQ ID NO: 2821 - protein, 132 aa, Homo sapiens [sequence omitted]

SEQ ID NO: 2822 - protein, 105 aa, Homo sapiens [sequence omitted]

SEQ ID NO: 2823 - protein, 331 aa, Homo sapiens
MDSLCRGVFAGNSRELSIRSCFPSLFQAEQTHRSILLGLLLGAGRTPQPDSALIRQALAERWSQWSLRGGLEMLPQALETHLTSRGVSVLRGQPVCGLSLQAEGRWKVSLRDSSLEADHVISAIPASVLSELLPAEAAPLARALSAITAVSVAVVNLQYQGAHLPVQGFGHLVPSSEDPGVLGIVYDSVAFPEQDGSPPGLRVTVMLGGSWLQTLEASGCVLSQELFQQRAQEAAATQLGLKEMPSHCLVHLHKTKNQLKWRQSHDRTVEWPKEYPGRSRKQAPSILHVPGCQLLRCRDRDHLGAVSEQPRSSAESRVGVASSTFSTFPLF

SEQ ID NO: 2824 - protein, 257 aa, Homo sapiens
MVKIQLQEQGTDGGAFASISCAHVIASAGTPEEEEEEVGAATFGAGWALQRKVLYGGRKAKELDKVEDGARAWNGSAEGPGKVEREDRGPGTSGIPVRSQGAEGLLARIHHGDRGGSRTALPIPCQTFPACHRNGDFTGGYRLGRSASTSGVRQVVLHTPRPCSQPRDALSQPHPALPLPLPLPPQPARERDGKLLEVIERKRCVCKEIKARHRPDRGLCKQESMPILPSWRRGPEPRKSGTPPCRRQHTVLWDTAI

SEQ ID NO: 2825 - protein, 137 aa, Homo sapiens
MTSPLVFASLSPDAMAKMLEMAALNVGTIRISLNTEPRPPVITQLAPSPETLPFCPEWGAENQSRHLKLPPFFICRCRGPLYQEESLSEIHCHSGLFLDQLSLPTPFSSLSVSLIHWTFISTKYVPGIMLAFGGTNK

SEQ ID NO: 2826 - protein, 130 aa, Homo sapiens
MLAPLFLCCLRNLFRKLISFQPPQLGRTNMHYSKLPRTAIETEFKQNVGPPPKDLTAEVYFPSIKSRSHLPAVFYNQYFKHPKCVGEYGPKNGAERQIEERKVLPTTMMFSMLADCVLKSTPIPILGVAM

SEQ ID NO: 2827 - protein, 100 aa, Homo sapiens
MMRRYESSASHPPPRPPKHPSVEETKLTLLTLAEERTVDLPKSPKRHHVDITKKLHPNQAGLDSKVLIGSQNDLVDEEKERSNRGATAVAETFKNEKHQK

SEQ ID NO: 2828 - protein, 398 aa, Homo sapiens
MHLGMVGEEGGVPSPVGDTAEVCVSPTLSSIALDPLYPSRCSWETFGYATSISMAQASDGLSPLQLSGQLNSLPCSLTFRQEETISIIRLIEQARHATYGIRKCFLFLLQCQLTLVVIQFLSCLVQLPPLLSTTDILWLSCFCYPLLSISLLGKPPHSSIMSMATGKNLQSIPKKTQHYFLLCFLLKFSLTISSCLICFGFTLQSFCDSSRDRNLTNCSSVMLPSNDDRAPAWFEDFANGLLSAQKLTAALIVLHTGERAPWEGVDDGGRGAPLWKSDPHIAPPSPVFISITHVHRTKPLWRKSPLTNLWWAVTVPVVLLGQVVQTAVDLQLWTHRDSHVHFGLEDVPLLTWLLGCLSLVLVVVTNEIVKLHEIRVRVRYQKRQKLQFETKLGMNSPF

SEQ ID NO: 2829 - protein, 356 aa, Homo sapiens
MRFLPTENEVKVLRLYERERKPLENLSDEDRFMMQFSKIERLMQKMTIMAFIGNFAESIQMLTPQLHAIIAASVSIKSSQKLKKILEIILALGNYMNSSKRGAVYGFKLQSLDLLLDTKSTDRKQTLLHYISNVVKEKYHQVSLFYNELHYVEKAAAVSLENVLLDVKELQRGMDLTKREYTMHDHNTLLKEFILNNEGKLKKLQDDAKIAQDAFDDVVKYFGENPKTTPPSVFFPVFVRFVKAYKQAEEENELRKKQEQALMEKLLEQEALMEQQDPKSPSHKSKRQQQELIAELRRRQVKDNRHVYEGKDGAIEDIITDLRNQPYRRADAVRRSVRRRFDDQNLRSVNGAEITM

SEQ ID NO: 2830 - protein, 157 aa, Homo sapiens [sequence omitted]

SEQ ID NO: 2831 - protein, 155 aa, Homo sapiens
MALEQRSDTIRAFLGFRPSYCGEGWEMSGLPMSHLPLLFPGSGIGCWGLWPHWVAFFSTLQVGIDFTASNGNPLDPSSLHYINPMGTNEYLSAIWAVGQIIQDYDSDKMFPALGFGAQLPPDWKVSHEFAINFNPTNPFCSAVLHPPHHHGRGHQ

SEQ ID NO: 2832 - protein, 249 aa, Homo sapiens
MRHQRIHSGEKPYECNECGNAFICFFDFNRHQRIHKGEKPYQCKECGKVFNNYPTLTQHQRIHTSVKPYECKECVKTFTWLSNLNKHQTIHTGDKPYECKDCKKAFLCYSTFIQHYRTHTNEKPMNVRNAARPLSREPILVNIKIFILVRNPMSLRNVGRPLLVSYLNRNQRIHTSEKPYQCKKCRKSFIDCSTLNTREFTLVRNPLNVRNVGRPLGRGRILLNIKEFLLVRNPMNVMNVRRPLLVFHR

SEQ ID NO: 2833 - protein, 427 aa, Homo sapiens [sequence omitted]

SEQ ID NO: 2834 - protein, 112 aa, Homo sapiens [sequence omitted]

SEQ ID NO: 2835 - protein, 301 aa, Homo sapiens
MFSFTGVLVIYEVLKKCIGKLISLRVCSIEGCVCVYVFVPGGKEFHEKKLNIFHQTNLICLFLNSSRNLWIFVSKFTEFDARKLHKLYKHAIKKRQESQQNSDQNSNLNPHVIRNPDVERLKENTNHDDSSRDSYSSDRHLTQYHDHHKDRHQGDSYKKSDSRKRPYSSFSNGKDHRDWDHYKQDSRYYSDREKHRKLDDHRSRDHRSNLEGSLKDRSHSDHRSHSDHRLHSDHRSSSEYTHHKSSRDYRYHSDWQMDHRASSSGPRSPLDQRSPYGSRSPFEHSVEHKSTPEHTWSSRKT

SEQ ID NO: 2836 - protein, 146 aa, Homo sapiens
MAENAAPGLISELKLAVPWGHIAAKAWGSLQGPPVLCLHGWLDNASSFDRLIPLLPQDFYYVAMDFGGHGLSSHYSPGVPYYLQTFVSEIRRVVAALKWNRFSILGHSFGEYSGQELTGPGVGLGGKDRSCCPTPFPCTYEICKER

SEQ ID NO: 2837 - protein, 150 aa, Homo sapiens [sequence omitted]

SEQ ID NO: 2838 - protein, 149 aa, Homo sapiens
MTETEVSSPAGSESSDGTTGHQASTGASGRVRPAPRPQGCVCISECACVHACQQAHMHVSTQGRVCMCVCACVCMTVHICARVCECACACVYVRMSVHECKCACVYVCKRVCTCACVCMCVQVCMCASVHMCIVCVSVRVVRVHICPYM

SEQ ID NO: 2839 - protein, 138 aa, Homo sapiens
MFGVFSNGHLFIRDASAVGVIDKQEGSQEANRAGENKDIFSCLVSGCQAQLPSCESISEKQSLVLVCQKLLPRLLQGRFPSPVQDDIDSILVQCGDSIRPDPEVLGAASQLKDILRPLRTCDSRFAYRYPDCKYNDKF

SEQ ID NO: 2840 - protein, 372 aa, Homo sapiens
MRAILKTGQLRGDHPLGAVTFRCVALVAVWLCGAATRSHVGEDSCGLGTELSLLGVSRCWGEGRQSSQSPSTAHPAARPRAVNPPSPFLPQEAVEKVTQHIHGLSGKKDGLVPMFINTHSGLFTHLGVFTLGARADSYYEYLLKQWIQGGKQETQLLEDYVEAIEGVRTHLLQHSEPSKLTFVGELAHGRFSAKMDHLVCFLPGTLALGVYHGLPASHMELAQELMETCYQMNRQMETGLSPEIVHFNLYPQPGRRDVEVKPADRHNLLRPETVESLFYLYRVTGDRKYQDWGWEILQSFSRFTRVPSGGYSSINNVQDPQKPEPRDKMESFFLGETLKYLFLLFSDDPNLLSLDAYVFNTEAHPLPIWTPA

SEQ ID NO: 2841 - protein, 262 aa, Homo sapiens
MARRGPAPVSSRGRTLAMAAAAWGVSLLLGLLPALGWNCLGRLDACSTVLPLYAKAYVLFCVLAFVGILAAICALYARIYCQVRANARRLPARPGTAGTTSTRARRKPRSLALLRTLSVVLLAFVACWGPLFLLLLLDVACPARTCPVLLQADPFLGLAMANSLLNPIIYTLTNRDLRHALLRLVCCGRHSCGRDPSGSQQSASAAEASGGLRRCLPPGLDGSFSGSERSSPQRDGLDTSGSTGSPGAPTAARTLVSEPAAD

SEQ ID NO: 2842 - protein, 188 aa, Homo sapiens
MMHPVASSNPAFCGPGKPSCLNEDAMRAADQFDIYSSQQSKYSHTVNHKPMVCQRQDPLNETHLQTTSGRSIEIKDELKKKKNLNRSGKRGRPSGTTKSAGYRTSTGRPLGTTKAAGFKTSPGRPLGTTKAAGYKVSPGRPPGSIKALSRLADLGYGCGTVAFPYPMMHGRAVHGVEETSSEVKPPNE

SEQ ID NO: 2843 - protein, 144 aa, Homo sapiens
MAPGVARGPTPYWRLRLGGAALLLLLIPVAAAQEPPGAACSQNTNKTCEECLKNVSCLWCNTNKACLDYPVTSVLPPASLCKLSSARWGVCWVNFEALIITMSVVGGTLLLGIAICCCCCCCCRRRPCVSGRRGGYGRRNGEQR

SEQ ID NO: 2844 - protein, 775 aa, Homo sapiens
MLDWMGNVESSLKEQGQVPLNSTALQDIISKNIMLEQDIAGRQSSINAMNEKVKKFMETTDPSTASSLQAKMKDLSARFSEASHKHKETLAKMEELKTKVELFENLSEKLQTFLETKTQALTEVDVPGKDVTELSQYMQESTSEFLEHKKHLEVLHSLLKEISSHGLPSDKALVLEKTNNLSKKFKEMEDTIKEKKEAVTSCQEQLDAFQVLVKSLKSWIKETTKKVPIVQPSFGAEDLGKSLEDTKKLQEKWSLKTPEIQKVNNSGISLCNLISAVTTPAKAIAAVKSGGAVLNGEGTATNTEEFWANKGLTSIKKDMTDISHGYEDLGLLLKDKIAELNTKLSKLQKAQEESSAMMQWLQKMNKTATKWQQTPAPTDTEAVKTQVEQNKSFEAELKQNVNKVQELKDKLTELLEENPDTPEAPRWKQMLTEIDSKWQELNQLTIDRQQKLEESSNNLTQFQTVEAQLKQWLVEKELMVSVLGPLSIDPNMLNTQRQQVQILLQEFATRKPQYEQLTAAGQGILSRPGEDPSLHGIVKEQLAAVTQKWDSLTGQLSDRCDWIDQAIVKSTQYQSLLRSLSDKLSDLDNKLSSSLAVSTHPDAMNQQLETAQKMKQEIQQEKKQIKVAQALCEDLSALVKEEYLKAELSRQLEGILKSFKDVEQKAENHVQHLQSACASSHQFQQMSRDFQAWLDTKKEEQNKSHPISAKLDVLESLIKDHKDFSKTLTAQSHMYEKTIAEGENLLLKTQGSEKAALQLQLNTIKTSWDTFNKQV

SEQ ID NO: 2845 - protein, 901 aa, Homo sapiens
MLDSFSQESTLPFREARKRTSFQPVQVWRNFTASQTTESPACSGASLGEMTAWTMGARGLDKRGSFFKLIDTIASEIGELKQEMVRTDVNLENGLEPAETHSMVRHKDGGYSEEEDVKTCARDSGYDSLSNRLSILDRLLHTHPIWLQLSLSEEEAAEVLQAQPPGIFLVHKSTKMQKKVLSLRLPCEFGAPLKEFAIKESTYTFSLEGSGISFADLFRLIAFYCISRDVLPFTLKLPYAVSTAKTEAQLEELAQMGLNFWSSPADSKPPNLPPPHRPLSSDGVCPASLRQLCLINGVHSIKTRTPSELECSQTNGALCFINPLFLKVHSQDLSGGLKRPSTRTPNANGTERTRSPPPRPPPPAINSLHTSPRLARTETQTSMPETVNHNKHGNVALPGTKPTPIPPPRLKKQASFLEAEGGAKTLSGGRPGAGPELELGTAGSPGGAPPEAAPGDCTRAPPPSSESRPPCHGGRQRLSDMSISTSSSDSLEFDRSMPLFGYEADTNSSLEDYEGESDQETMAPPIKSKKKRSSSFVLPKLVKSQLQKVSGVFSSFMTPEKRMVRRIAELSRDKCTYFGCLVQDYVSFLQENKECHVSSTDMLQTIRQFMTQVKNYLSQSSELDPPIESLIPEDQIDVVLEKAMHKCILKPLKGHVEAMLKDFHMADGSWKQLKENLQLVRQRNPQELGVFAPTPDFVDVEKIKVKFMTMQKMYSPEKKVMLLLRVCKLIYTVMENNSGRMYGADDFLPVLTYVIAQCDMLELDTEIEYMMELLDPSLLHGEGGYYLTSAYGALSLIKNFQEEQAARLLSSETRDTLRQWHKRRTTNRTIPSVDDFQNYLRVAFQEVNSGCTGKTLLVRPYITTEDVCQICAEKFKVGDPEEYSLFLFVDETWQQLAEDTY

SEQ ID NO: 2846 - protein, 149 aa, Homo sapiens
MCGSTQHGWGELETSACSELCWKPEEEVAINFCKKKMKVYQSELLKQKRILLKEHRIAPRASRRADEQALRSQQEEWQARQAEPWPRLYHRSTSGKHTDASTGTQTSQFQSVPPMPLNTGLGCCCFHHCNGFSTLPVSLSKFTVPACCI

SEQ ID NO: 2847 - protein, 329 aa, Homo sapiens
MCSMFRFSSWDCLTSNLTFTPLSPPKPKDPVSAAVPAPGRNNSQIASGQNQPQAAAGSHQLSMGQPHNAAGPSPHTLRRAVKKPAPAPPKPGNPPPGHPGGQSSSGTSQHPPSLSPKPPTRSPSPPTQHTGQPPGQPSAPSQLSAPRRYSSSLSPIQAPNHPPPQPPTQATPLMHTKPNSQGPPNPMALPSEHGLEQPSHTPPQTPTPPSTPPLGKQNPSLPAPQTLAGGNPETAQPHAGTLPRPRPVPKPRNRPSVPPPPQPPGVHSAGDSSLTNTAPTASKIVTDSNSRVSEPHRSIFPEMHSDSASKGVPGRILLDIDNDTESTAL

SEQ ID NO: 2848 - protein, 272 aa, Homo sapiens [sequence omitted]

SEQ ID NO: 2849 - protein, 122 aa, Homo sapiens [sequence omitted]

SEQ ID NO: 2850 - protein, 239 aa, Homo sapiens
MGNSALRAHVETAQKTGVFQLKDRGLTEFPADLQKLTSNLRTIDLSNNKIESLPPLLIGKFTLLKSLSLNNNKLTVLPDEICNLKKLETLSLNNNHLRELPSTFGQLSALKTLSLSGNQLGALPPQLCSLRHLDVMDLSKNQIRSIPDSVGELQVIELNLNQNQISQISVKISCCPRLKILRLEENCLELSMLPQSILSDSQICLLAVEGNLFEIKKLRELEGYDKYMERFTATKKNFA

SEQ ID NO: 2851 - protein, 124 aa, Homo sapiens
MDRPVPAQSAALGGTRTRGFEAGSLLLLGVRAAAAQPLQPAFGRLTAASSAILQWHRSPRRLSEALLYLVRAVSTFTRRERPPPRGPEFDARPLPTRSCDSPSEAEVYLVREREQHGERGEALP

SEQ ID NO: 2852 - protein, 107 aa, Homo sapiens
MAPSRKFFVGRNWKMNGRKKCLGELIGTQNAATVPADTKVICALATAYNELARQKLAPKIAVAPQNCYKVTNGAFTGEISPGMVKDLGVTWVVWSWGTQKACLWGVR

SEQ ID NO: 2853 - protein, 218 aa, Homo sapiens
MLSVPSWLCMFSSHFNRNVPRCDIYEFRQLGTVHTNRSCLWCGKMMNGGCSAWGGGLLSLWHAYSLIYYTPKYKTTPPLQLSAPVLASARGDHAPGALLSSQGDSEALLRIMLWRQLIYWQLLALFFLPFCLCQDEYMEVSGRTNKVVARIVQSHQQTGRSGSRREKVRERSHPKTGTVDNNTSTDLKSLRPDELPHPEVDDLAQITTFWGQVLRILF

SEQ ID NO: 2854 - protein, 118 aa, Homo sapiens
MEPIVLQSVPHDHCNKVETELKLICGDVLDALDKHLIPAATTGKSKVFYYEMKGVYHRYLAEFATGNDRKEVAENSLVAYKAASDIATGFSMLARLGSNSWFQVNLPTWLPKVLRLQA

SEQ ID NO: 2855 - protein, 945 aa, Homo sapiens [sequence omitted]

SEQ ID NO: 2856 - protein, 113 aa, Homo sapiens [sequence omitted]

SEQ ID NO: 2857 - protein, 101 aa, Homo sapiens
MNMASCRLSGPCAAPQAPPRLSTLPLFPPYFQPKGPWAFGCGPRLTPGCCRCLTVELLWTVGCFVALLALLWTHSSLPAFDILPCPHHFPDSQKGLLGSSQ

SEQ ID NO: 2858 - protein, 485 aa, Homo sapiens [sequence omitted]

SEQ ID NO: 2859 - protein, 127 aa, Homo sapiens
MCVRNLVQKYCRGITAERKAMMQQKVVTSEIFRGRKDGYTESLNQPFVNSRIDEGDINPKVLQLISHEKIQYGVPVIKYDRKGFKARQRQLILTQKAAYVVELAKIKQKIEYSALKGKKWAIFKTMH

SEQ ID NO: 2860 - protein, 636 aa, Homo sapiens
MVRNDMFYNHYPYVPETEQETNVAKPARYRRAVSYDSKEYYMRLASGNPAIVQDAIVESSEGEAAQQEPEHGEDTIAKVKGLVKPPLKRSRSAPDGGDEENQEQLQDQIAEGSSIEEEEKTDNATLLRLLEEGEKIQHMYRCARVQGLDTSEGLLLFGKEHFYVIDGFTMTATREIRDIETLPPNMHEPIIPRGARQGPSQLKRTCSIFAYEDIKEVHKRRYLLQPIAVEVFSGDGRNYLLAFQKGIRNKVYQRFLAVVPSLTDSSESVSGQRPNTSVEQGSGLLSTLVGEKSVTQRWERGEISNFQYLMHLNTLAGRSYNDLMQYPVFPWILADYDSEEVDLTNPKTFRNLAKPMGAQTDERLAQYKKRYKDWEDPNGETPAYHYGTHYSSAMIVASYLVRMEPFTQIFLRLQGGHFDLADRMFHSVREAWYSASKHNMADVKELIPEFFYLPEFLFNSNNFDLGCKQNGTKLGDVILPPWAKGDPREFIRVHREALECDYVSAHLHEWIDLIFGYKQQGPAAVEAVNVFHHLFYEGQVDIYNINDPLKETATIGFINNFGQIPKQLFKKPHPPKRVRSRLNGDNAGISVLPGSTSDKIFFHHLDNLRPSLTPVKELKEPVGQIVCTDKGILAVE

SEQ ID NO: 2861 - protein, 111 aa, Homo sapiens [sequence omitted]

SEQ ID NO: 2862 - protein, 119 aa, Homo sapiens
MGCTLAWGPTGCGLDAFPLGGSFLPRSPPLWRGPRRPPVGPPLQTALSLLGCLQPGPAHACPPEKYVAFQKEVGGHGQALWTLTSAPPPVPQGPRPGGPRPAFLGPQVAQWCRGIQTFC

SEQ ID NO: 2863 - protein, 168 aa, Homo sapiens [sequence omitted]

SEQ ID NO: 2864 - protein, 174 aa, Homo sapiens
MATATLKRNSGTCLFVAVKRLILCYEIQRTKPFHRKFNEIVAPGSVQCLAVLRDRLCVGYPSGFCLLSIQGDGQPLNLVNPNDPSLAFLSQQSFDALCAVELESEEYLLCFSHMGLYVDPQGRRARAQELMWPAAPVACSMYMFSVAYPCCCFSHRQSACVRFCFGLSSSPLVE

SEQ ID NO: 2865 - protein, 128 aa, Homo sapiens
MSSVSERSPREGCSEGECRRSLAFLLRNGLPSPSRTAGWRGEQGASWTVEALSATEWLDRGCVPPPAAGPGIPARLGSAGAEPHGALGQEQPLAGGACGTAGPGVWEAALSLPLQPRAEVCVGRVSPS

SEQ ID NO: 2866 - protein, 629 aa, Homo sapiens [sequence omitted]

SEQ ID NO: 2867 - protein, 238 aa, Homo sapiens [sequence omitted]

SEQ ID NO: 2868 - protein, 107 aa, Homo sapiens
MTDQRTVHAPSFPRRLGSPGTCILSRGRILSHISEDTCLPRNLKSTFIAVSTQRTQENTHTHTHTHTHTHTHPGVLANGPRLHEKSVLVTVGTCYSGDSLITTKLIF

SEQ ID NO: 2869 - protein, 125 aa, Homo sapiens [sequence omitted]

SEQ ID NO: 2870 - protein, 114 aa, Homo sapiens
MKVLLRDIIPRFGLPLTLGSDNGLAFVAEIVQDLTRLLKIKWKLHPVYQPQCSVKMEHMNQILKQLLKKFCQETHLRWDQVLPMVFLQVRCTPTKQTTLGICPMRFCSASHPQS

SEQ ID NO: 2871 - protein, 106 aa, Homo sapiens
MQRAAAEMWYGVFLWALVSSLFFHVPAGLLALFTLRHHKYGRFMSVSILLMGIVGPITAGILTSAAIAGVYRAAGKEMIPFEALTLGTGQTFCVLVVSFLRILATL

SEQ ID NO: 2872 - protein, 209 aa, Homo sapiens [sequence omitted]

SEQ ID NO: 2873 - protein, 117 aa, Homo sapiens
MGSCCVAQTGLKLLSSSDPPTVASQSAEIKDRVSLSLPRLEFNGTISAHCNLCSVVERRCGRNSHRIGPHQSFKQRYAKLCLLDVPRTCNFGYLQNAFLLWPCATSQRDRMPEAQAL

SEQ ID NO: 2874 - protein, 985 aa, Homo sapiens
MAVWSLLSARAVTAFLLLFLPRFLQAQTFSFPFQQPEKCDNNQYFDISALSCVPCGANQRQDARGTSCVCLPGFQMISNNGGPAIICKKCPENMKGVTEDGWNCISCPSDLTAEGKCHCPIGHILVERDINGTLLSQATCELCDGNENSFMVVNALGDRCVRCEPTFVNTSRSCACSEPNILTGGLCFSSTGNFPLRRISAARYGEVGMSLTSEWFAKYLQSSAAACWVYANLTSCQALGNMCVMNMNSYDFATFDACGLFQFIFENTAGLSTVHSISFWRQNLPWLFYGDQLGLAPQVLSSTSLPTNFSFKGENQNTKLKFVAASYDIRGNFLKWQTLEGGVLQLCPDTETRLNAAYSFGTTYQQNCEIPISKILIDFPTPIFYDVYLEYTDENQHQYILAVPVLNLNLQHNKIFVNQDSNSGKWLLTRRIFLVDAVSGRENDLGTQPRVIRVATQISLSVHLVPNTINGNIYPPLITIAYSDIDIKDANSQSVKVSFSVTYEMDHGEAHVQTDIALGVLGGLAVLASLLKTAGWKRRIGSPMIDLQTVVKFLVYYAGDLANVFFIITVGTGLYWLIFFKAQKSVSVLLPMPVQEERFVTYVGCAFALKALQFLHKLISQITIDVFFIDWERPKGKVLKAVEGEGGVRSATVPVSIWRTYFVANEWNEIQTVRKINSLFQVLTVLFFLEVVGFKNLALMDSSSSLSRNPPSYIAPYSCILRYAVSAALWLAIGIIQVVFFAVFYERFIEDKIRQFVDLCSMSNISVFLLSHKCFGYYIHGRSVHGHADTNMEEMNMNLKREAENLCSQRGLVPNTDGQTFEIAISNQMRQHYDRIHETLIRKNGPARLLSSSASTFEQSIKAYHMMNKFLGSFIDHVHKEMDYFIKDKLLLERILGMEFMEPMEKSIFYNDEGYSFSSVLYYGNEATLLIFDLLFFCVVDLACQNFILASFLTYLQQEIFRYIRNTVGQKNLASKTLVDQRFLI

SEQ ID NO: 2875 - protein, 118 aa, Homo sapiens
MERKKMSLGEKENDSSGRGKARISVPATALILETLSIRTLMRWTENADANAKEKSVLKKQPWTWSYQIIRSGSWTGWRSQAAEMQFIAGVFLNREKSPQNSKNSRNSKSRVLRSKFSV

SEQ ID NO: 2876 - protein, 404 aa, Homo sapiens
MLRAIAEERGRLSLRREVCGLGCFKDDRIVFWTWMFSTYFMEKWAPRQDDMLFYVRRKLAYSGSESGADGRKAAEPEVEVEVYRRDSKKLPGLGDPDIDWEESVCLNLILQKLDYMVTCAVCTRADGGDIHIHKKKSQQVFASPSKHPMDSKGEESKISYPNIFFMIDSFEEVFSDMTVGEGEMVCVELVASDKTNTFQGVIFQGSIRYEALKKVYDNRVSVAARMAQKMSFGFYKYSNMEFVRMKGPQGKGHAEMAVSRVSTGDTSPCGTEEDSSPASPMHERVTSFSTPPTPERNNRPAFFSPSLKRKVPRNRIAEMKKSHSANDSEEFFREDDGGADLHNATNLRSRSLSGTGRSLVGSWLKLNRADGNFLLYAHLTYVTLPLHRILTDILEVRQKPILMT

SEQ ID NO: 2877 - protein, 157 aa, Homo sapiens [sequence omitted]

SEQ ID NO: 2878 - protein, 153 aa, Homo sapiens [sequence omitted]

SEQ ID NO: 2879 - protein, 117 aa, Homo sapiens [sequence omitted]

SEQ ID NO: 2880 - protein, 131 aa, Homo sapiens
MEFAQISRVKTFQENLSAFKRDPQINILLLPLHTGSNGLTIIEATHVLLVEPILNPAHELQAIGRVHRIGQTKPTIVHRFLIKATIEERMQAMLKTAERSHTNSSAKHSEASVLTVADLADLFTKETEELE

SEQ ID NO: 2881 - protein, 116 aa, Homo sapiens
MSKGTHQHRSTPACWQAIDQRKNAEFVAGGQRRVRPPYLTPGENRLPSGSPVCRELLPLNKTFHSFFKPTCDPILPVHQGLAVFPRLGAVAIQRYNDSSLQPGTPGLKRSSCLSCD

SEQ ID NO: 2882 - protein, 373 aa, Homo sapiens [sequence omitted]

SEQ ID NO: 2883 - protein, 173 aa, Homo sapiens [sequence omitted]

SEQ ID NO: 2884 - protein, 273 aa, Homo sapiens
MGTEVGISWTRVGTGATVGLLPPHPHQQMHRDEEDSDVDVTFQPWHKEMLQQLLVMLSSTVATRPQKAACPHQESQSHGPPKESRPSIQLPRTGSLLPQLSDITPYQPGDLGLVPRQVHIPPNPQDLRLLSSITRVGTFRAHSSPEQGKSGIPLKRPQLPSQHLSFFFFFFFFLRQSLTLSPRLECSATISAHSNLRLPGSSDSPASVSQVAGITGMHHHAWLLFVFLVETGFHHVGQAGLELLTSSNPPASASQSAGIIGVSHCTRPPSQHL

SEQ ID NO: 2885 - protein, 322 aa, Homo sapiens [sequence omitted]

SEQ ID NO: 2886 - protein, 337 aa, Homo sapiens
MRCHTGEKPLHCNKCGMVFTYYSCLARHQRMHTGEKPYKCNVCGKVFIDSGNLSIHRRSHTGEKPFQCNECGKVFSYYSCLARHRKIHTGEKPYKCNDCGKAYTQRSSLTKHLVIHTGENPYHCNEFGEAFIQSSKLARYHRNPTGEKPHKCSECGRTFSHKTSLVYHQRRHTGEMPYKCIECGKVFNSTTTLARHRRIHTGEKPYKCNECGKVFRYRSGLARHWSIHTGEKPYKCNECGKAFRVRSILLNHQMMHTGEKPYKCNECGKALSKGQTWFTIRETILERSHTNVWNVARRLGGGLASLNTNEFILVKNLINVMSVANLTLVAQASLNIR

SEQ ID NO: 2887 - protein, 311 aa, Homo sapiens
MAARLGALAASGLYRRRQHRQSPPPATGNMSDALANAVCQRCQARFSPAERIVNSNGELYHEHCFVCAQCFRPFPEGLFYEFEGRKYCEHDFQMLFAPCCGSCGEFIIGRVIKAMNNDWHPGCFRCELCDVELADLGFVKNAGRHLCRPCHNREKAKGLGKYICQRCHLVIDEQPLMFRSDAYHPDHFNCTHCGKELTAEARELKGELYCLPCHDKMGVPICGACRRPIEGRVVNALGKQWHVEHFVCAKCEKPFLGHRHYEKKGLAYCETHYNQVSPVQNLQGCGSGGVARRAAVSKGGCGHPLRSSARC

SEQ ID NO: 2888 - protein, 297 aa, Homo sapiens [sequence omitted]

SEQ ID NO: 2889 - protein, 148 aa, Homo sapiens
MMPNSVIIICRDAWCHHLQGSTSTMCHHLPGFHSNMCHYLPVSTSTMVLSPARIHESQCCHHPLGSTITLVSSSPVIHEVQCCHHPLGSTMTLVSSSPVIHEVQCCHHPLGSTITLVSSSPRIHEVQCCLSPSTSIHHNPGVIFSQDP

SEQ ID NO: 2890 - protein, 101 aa, Homo sapiens
MCPPQSCSCTVLCLSIHPKLSLVTTLTHSSINRLVPKRGQTKEAWQHVLQISFLFSSSVFFFLQFSTTSLASGIISYDDHSQISFSSLYLSFTFQFSILIL

SEQ ID NO: 2891 - protein, 399 aa, Homo sapiens
MATGDLKRSLRNLEQVLRLLNYPEEVDCVGLIKGDPAASLPIISYSFTSYSPYVTELIMESNVELIAKNDLRFIDAVYKLLRDQFNYKPILTKKQFIQCGFAEWKIQIVCDILNCVMKKHKELSSLQKIPSQQRKKISSGKSEPPLGNEKISAEAVGVDISGRFMTSGKKKAVVIRHLYNEDNVDISEDTLSPITDVNEAVDVSDLNATEIKMPEVKVPEIKAEQQDVNVNPEITALQTMLAECQENLKKLTSIEKRLDCLEQKMKGKVMVDENTWTNLLSRVTLLETEMLLSKKNDEFIEFNEVSEDYASCSDMDLLNPHRKSEVERPASIPLSSGYSTASSDSTPRASTVNYCGLNEISENFPAWSATSSCSSLSWLLRGHTSYLSSQSFAWPLSCV

SEQ ID NO: 2892 - protein, 593 aa, Homo sapiens
MQKQDDTLAELPGSPPEKCDSLGSGVATVKVALPDDHLKDEMDWQSSALGEITEADSSGESDDTVIEDITADTSFENNKIQAEKPVSIPSAVVKTGEREIKEIPSCEREEKTSKNFEELVSDSELHQDQPDILGRSPASEAACSKVPDTNVSLEDVSEVAPEKPITTENPKLPSTVSPNVFNETEFSLNVTTSAYLESLHGKNVKHIDDSSPEDLIAAFTETRDKGIVDSERNAFKAISEKMTDFKTTPPVEVLHENESGGSEIKDIGSKYSEQSKETNGSEPLGVFPTQGTPVASLDLEQEQLTIKALKELGERQVEKSTSAQRDAELPSEEVLKQTFTFAPESWPQRSYDILERNVKNGSDLGISQKPITIRETTRVDAVSSLSKTELVKKHVLARLLTDFSVHDLIFWRDVKKTGFVFGTTLIMLLSLAAFSVISVVSYLILALLSVTISFRIYKSVIQAVQKSEEGHSFKAYLDVDITLSSEAFHNYMNAAMVHINRALKLIIRLFLVEDLVDSLKLAVFMWLMTYVGAVFNGITLLILAELLIFSVPIVYEKYKTQIDHYVGIARDQTKSIVEKIQAKLPGIAKKKAE

SEQ ID NO: 2893 - protein, 418 aa, Homo sapiens
MSVKMGKKYKNIVLLKGLEVINDYHFRMVKSLLSNDLKLNLKMREEYDKIQIADLMEEKFRGDAGLGKLIKIFEDIPTLEDLAETLKKEKLKVKGPALSRKRKKEVDATSPAPSTSSTVKTEGAEATPGAQKRKKSTKEKAGPKGSKVSEEQTQPPSPAGAGMSTAMGRSPSPKTSLSAPPNTSSTENPKTVAKCQVTPRRNVLQKRPVIVKVLSTTKPFEYETPEMEKKIMFHATVATQTQFFHVKVLNTSLKEKFTPKKIIAIANYVCRNGFLEVYPFTLVADVNADRNMEIPKGLIRSASVTPKINQLCSQTKGSFVNGVFEVHKKNVRGEFTYYEIQDNTGKMEVVVHGRLTTINCEEGDKLKLTCFELAPKSGNTGELRSVIHSHIKVIKTRKNKKDILNPDSSMETSPDFFF

SEQ ID NO: 2894 - protein, 340 aa, Homo sapiens [sequence omitted]

SEQ ID NO: 2895 - protein, 232 aa, Homo sapiens [sequence omitted]

SEQ ID NO: 2896 - protein, 423 aa, Homo sapiens [sequence omitted]

SEQ ID NO: 2897 - protein, 130 aa, Homo sapiens
MRFILTNYNKLSIQSWFSLRRVEIISNNSIQAVFNPTGVYAPSGYSYRCQRVGSLQQDQALLLPSDTDDGSSLWEVTFIDFQALGLVPCMKVHFKANRTIFLEWEEKASSLNRAGVSQSCQCWSPTPGFR

SEQ ID NO: 2898 - protein, 136 aa, Homo sapiens
MRSTQFVLLIKAKVFFFSLIFLRRSLPLFPRLECSDTISAHHNLHFPGSSDSPASTSRVTGTTMLHHARLIFVFLVETGFHYIGQAGLQLLTTLTARISLPKCWDYRLEPLHQAFFFLYINTLESTNAAPSQKHVA

SEQ ID NO: 2899 - protein, 136 aa, Homo sapiens
MSATQAENKQTALRATGSGWMHVFPAPTWQSLRPGLCISSGETEAPRGPTPHPEQLTSCPILLPPGPSPIPSPTPGLSFLSRQGGIWTVPVPLLCPLPPGVPVARSLPEAEDGAGRVWPGAERGSGAGLCPAPAGV

SEQ ID NO: 2900 - protein, 248 aa, Homo sapiens
MGKRDNRVAYMNPIAMARWRGPTQSVGPTIQDYLNRPRPTWEEVKKQLENKKTGSKALAEFEEKMNENWKKELEKSREKLLSGNESSSKKRERKKKRKKKSCRSSSSSSSSDSSSSSSDSEDEEKKQGKRRKKKKNRSYKSSQSSTHESESESKESVKKKKKSKDETEKEKDVRSLSKKRKKSYPDDKPLSSESSSESDYEEDVQAKKKRRCEEREQAKEKVKKKKKKQHKKHSKKKKKKSGSSHKSR

SEQ ID NO: 2901 - protein, 233 aa, Homo sapiens
MKKCMNVEMKGDADGDDADGDDDADGDDADGDDADGEQWPCRVFADLGLASGCGGSASQGFEFHLQCLPAMPPWVTFILLPGKWGCWQPLPPGITDTAWSGCDPFGYRRGWWTSQVGRSSLDERPRTIHRRAQESLLSPSNSTEPAVNCWLLPVTFPCPYFHSLEAARTTAGWPWPLPQCSSLCRHLTPRRQPGRPWLTAEVLLHPRVLAAPCPLGPGWAGQEGTHLSLLSLP

SEQ ID NO: 2902 - protein, 168 aa, Homo sapiens [sequence omitted]

SEQ ID NO: 2903 - protein, 105 aa, Homo sapiens
MSETSCFRIYLQTLECSFKRRNSLPWQRKSQVLTKASPIPVLLLPAALPWDVGLPAVSSHRHPPASGPLHMPFLLPEHSSPESHMVHPSLPASLCSNVTFQRGLP

SEQ ID NO: 2904 - protein, 329 aa, Homo sapiens
MLPLEPYLTQTSAVPQMSHFMCHSPTHKPQGLLPWAPFHQASVSLYPISPWPSESVCPPTCPGGASCWFPAGNAWDRVELGFLGFGAGGVSIAVPGFPLSCGQGCCAGGWLGHGARFPAKLRAFPQVIRRGWLTINNISLMKGGSKEYWFVLTAESLSWYKDEEEKEKKYMLPLDNLKIRDVEKGFMSNKHVFAIFNTEQRNVYKDLRQIELACDSQEDVDSWKASFLRAGVYPEKDQVRSRPAQPGPEPPPGRGSRAGFPQDRSFSGHVSQESLKSCSRCPLEQAKEKLGVLCHQGPESSLTEASDRGTQGMGSHLLCSLLFSPSILR

SEQ ID NO: 2905 - protein, 101 aa, Homo sapiens
MRIATTLAAEAAALPARHHRLLCLFPSLSPGPCIDLARAAPHCACQLSHALRLSTAGRQGQTSRGKRKQPAQTGTARVLFDQHWNWKLGFEEVKSKYNIVF

SEQ ID NO: 2906 - protein, 104 aa, Homo sapiens
MISVLYLFKAISFGVLSLWPFKIVSEFPRKHFFILFLFIFKIFETESRSVTQAGVECRNLGSLQPPPPGFKQFSCLSFLRSWDYRCVPPRQANFCIFIYLFIYF

SEQ ID NO: 2907 - protein, 114 aa, Homo sapiens
MEAGERMEPGSLEPGTLPRCGWWWPQTSRRAAGSGSFFCRAGGLGEGRGNATCWRLEPVPPWLTSMWLVAARLAVVGGDVGDCSSATVVEMCWAFAVLGTCSHLLSSLESTALE

SEQ ID NO: 2908 - protein, 714 aa, Homo sapiens
MLETYSHLLSVGYQVPKPEVVMLEQGKEPWALQGERPRHSCPGEKLWDHNQHRKIIGYKPASSQDQKIYSGEKSYECAEFGKSFTWKSQFKVHLKVPTGEKLYVCIECGRAFVQKPEFITHQKTHMREKPYKCNECGKSFFQVSSLFRHHRIHTGEKLYECSECGKGFPYNSDLSLHEKIHTGERHHECTDCGKAFTQKSTLKIHQKIHTGERSYICIECGQAFIQKTQLIAHRRIHSGEKPYECNNCGKSFISKSQLQVHQRVHTRVKPYICTEYGKVFSNNSNLITHEKIQSREKSSICTECGKAFTYRSELIIHQRIHTGEKPYECSDCGRAFTQKSALTVHQRIHTGEKSYICMKCGLAFIRKAHLITHQIIHTGEKPYKCGHCGKLFTSKSQLHVHKRIHTGEKPYVCNKCGKAFTNRSNLITHQKTHTGEKSYICSKCGKAFTQRSDLITHQRIHTGEKPYECNTCGKAFTQKSNLNIHQKIHTGERQYECHECGKAFNQKSILIVHQKIHTGEKPYVCTECGRAFIRKSNFITHQRIHTGEKPYECSDCGKSFTSKSQLLVHQPVHTGEKPYVCAECGKAFSGRSNLSKHQKTHTGEKPYICSECGKTFRQKSELITHHRIHTGEKPYECSDCGKSFTKKSQLQVHQRIHTGEKPYVCAECGKAFSNRSNLNKHQTTHTGDKPYKCGICGKGFVQKSVFSVHQSSHA

SEQ ID NO: 2909 - protein, 145 aa, Homo sapiens
MKSRKEQRLLTGPSPLMTAALGTTSLLSIATTLACGLLLVEEAINQNEYHSGNLGWSDLIFSHSGHRYFRPPRGSLTLSILLAPLFEELGTISPGTGLEVLLNNTTVFFFPLHQGPVDVSRPDIKLLVLKSLRMRVLLSLSTLAL

SEQ ID NO: 2910 - protein, 119 aa, Homo sapiens [sequence omitted]

SEQ ID NO: 2911 - protein, 291 aa, Homo sapiens
MACLSPSQLQKFQQDGFLVLEGFLSAEECVAMQQRIGEIVAEMDVPLHCRTEFSTQEEEQLRAQGSTDYFLSSGDKIRFFFEKGVFDEKGNFLVPPEKSINKIGHALHAHDPVFKSITHSFKVQTLARSLGLQMPVVVQSMYIFKQPHFGGEVSPHQDASFLYTEPLGRVLGVWIAVEDATLENGCLWFIPGSHTSGVSRRMVRAPVGSAPGTSFLGSEPARDNSLFVPTPVQRGALVLIHGEVVHKSKQNLSDRSRQAYTFHLMEASGTTWSPENWLQPTAELPFPQLYT

SEQ ID NO: 2912 - protein, 298 aa, Homo sapiens [sequence omitted]

SEQ ID NO: 2913 - protein, 106 aa, Homo sapiens
MQRHRREAMRASSQMSLPASATSQGWGQGCPSRWGRKPSPQQNPIIFFVLVRKFLLLCVLLEDIFCDRVIIACTERFLGTAYDSIYLTQISHHTFTYFAAVSSRSP

SEQ ID NO: 2914 - protein, 369 aa, Homo sapiens
MEMAEAELHKERLQAIAEKRKRQTEIEGKRQQLDEQILLLQHSKSKVLREKWLLQGIPAGTAEEDEFRVKQLEDNIQRLEQEIQTLESEESQISAKEQIILEKLKETEKSFKDFQKGFSSTDGAVYAMEINVEKDKQTGETKILSTSTIGPEGVHQKGVKVYDDGTKVVYEVRSGGTVVENGVHKLSTKDVEELIQKAGQSSLGGGHVSERTVIADGSLSHPKEHMLCKEAKLEMVHKSRKDHSSGNPGQQAQAPSAAGPEANLDQPVTMIFMGYQNIEDEEETKKVLGYDETIKAELVLIDEDDEKSLREKTVTDVSTIDGNAAELVSGRPVSDTTEPSSPEGKEESLATEPAPGTQKKKRCQCCVVM

SEQ ID NO: 2915 - protein, 1073 aa, Homo sapiens [sequence omitted]

SEQ ID NO: 2916 - protein, 133 aa, Homo sapiens
MSGHLPWAEARLLQGPPAPSPATEQPRLNTAHAQSHRPKPMELFLIIKFNHFHNWFLEVCSAPLPLQTYSFSLPFVDFTSLHTETLQPGIPSLCLLPAASTQHCGLSLLPRHAISKGRKGQCPEAHLFCDCLR

SEQ ID NO: 2917 - protein, 117 aa, Homo sapiens [sequence omitted]

SEQ ID NO: 2918 - protein, 469 aa, Homo sapiens
MKGDADVEIQMEEGRNKDQVGGQDAAQTQSCGRENVGEVKKENSVETQALDWGKQECVGNGNVTEIQTPRWEKHDQGGSKKAKKTQASGGENQKQLSHEIQVGWGNKGLRRDEDAKETQIATKKKLREIREKDWVVIQALWWGNRRQVASEIYREFEILCWENQNWIGGEHRAEIQASERRDQRKDGCEDGTNILAPEAEIQEQLKGETDVETQSNEPLREEDGTDIQSLGRREVKGEDDKDTQELGRKNQGQLGNEFSGKIHIPKGKNQEHIRGEDGAHTQISESGNWGKLTSQIDGEMHSAEWKKDQQIGGENGAEIQIQGKRNLREVGGEDGVKTWAPGKETQSQFRSDLGRKILLSEWKSQKQMGSENGTEIQAPVERNQREPGGEDGVKTQRPKRENEDQLDSEIGGSHSPGRRNWELIGKDVAENQASEKRNQREVGNEDGRMIWRLRGKNWRLRAKKQTVKK

SEQ ID NO: 2919 - protein, 159 aa, Homo sapiens [sequence omitted]

SEQ ID NO: 2920 - protein, 129 aa, Homo sapiens
MTEKPPRSRARSPGQGQLKLCTWALLIASHQPGLAAASSHPTPPQQGELPHTVGPQSSGHTGPPRSLWRARPWQGPLSGPHSEPQAQGLLQCETCCQHRPTGSGLCRDTGASTTGHPVLSQPACAPCGQ

SEQ ID NO: 2921 - protein, 103 aa, Homo sapiens [sequence omitted]

SEQ ID NO: 2922 - protein, 211 aa, Homo sapiens [sequence omitted]

SEQ ID NO: 2923 - protein, 157 aa, Homo sapiens [sequence omitted]

SEQ ID NO: 2924 - protein, 106 aa, Homo sapiens [sequence omitted]

SEQ ID NO: 2925 - protein, 144 aa, Homo sapiens
MERASGLSPGGGLGATSRQMSPGTQLANPPDHGDKDCLGRISPGSGKQIQAAGQLPGPPTSLAPAQGRLRSLTPWGLQTPEHSEPEGIGHLQAATEAVLPHSTQNLITKRNLMVQARVQWRDLGSLKPPPPRFKQFSCFSLPSS

SEQ ID NO: 2926 - protein, 256 aa, Homo sapiens
MDPTCSSECIYNLIPSDLKEPPQPPRYISIFKATVKDDMQKAKTAMKTMGPAKVEVPSPKDFLKKHSKEKTLPPKKNFDRNVPKKPAVPLKTDHPVMGIQSGKNFINTNAADIIMGVAKKPKPIYVDKRTGDKHDLEPSGLVPKYINKKDYGVTPEYICKRNEEIKKAQEDYDRYIQENLKKAAMKRLSDEEREAVLQGLKKNWEEVHKEFQSLSVFIDSIPKKIRKQRLEEEMKQLEHDIGIIEKHKIIYIANNA

SEQ ID NO: 2927 - protein, 108 aa, Homo sapiens
MCQDRRVPAESQPRTHRDIEIPLEGRGGNKLLPLLLPLQPSTLLPCSSTLFFVALLLIQPSTPPLAALLPPLPPPVCSLQLPPPPILLSLIFPQDPALMPAPQAFADP

SEQ ID NO: 2928 - protein, 950 aa, Homo sapiens [sequence omitted]

SEQ ID NO: 2929 - protein, 289 aa, Homo sapiens [sequence omitted]

SEQ ID NO: 2930 - protein, 280 aa, Homo sapiens
MTGKTQTSNVTNKNDPKSINSRVFIGNLNTAIVKKVDIEAIFSKYGKIVGCSVHKGYAFVQYMSERHARAAVAGENARVIAGQPLDINMAGEPKPYRPKPGNKRPLSALYSGYVFDYDYYRDDFYNRLFDYHGRVPPPPRAVIPLKRPRVAVTTTRRGKGVFSMKGGSRSTASGSTGSKLKSDELQTIKKELTQIKTKIDSLLGRLEKIEKQQKAEAEAQKKQLEESLVLIQEECVSEIADHSTEEPAEGGPDADGEEMTDGIEEDFDEDGGHELFLQIK

SEQ ID NO: 2931 - protein, 112 aa, Homo sapiens
MLVVVSLTHSFISATVLSTTCTRGRGVNKIPFCLGGCPLPMGLAISRKAPQSSTLFWLCVKDVCEQAQSFAARMRGQSIPLHTHPGADRLVPPSLHACPSTGSFAAPAPPAP

SEQ ID NO: 2932 - protein, 105 aa, Homo sapiens [sequence omitted]

SEQ ID NO: 2933 - protein, 490 aa, Homo sapiens
MGIREFPSGAPRGKSIAVGMRRSPDVSPRRLSDISPQLRQLKYLVVDEAIKEDLKWSRSVEDLTSGPVGLTSIEERILRITGYYGYQPWAASCKREERPRDSPGPAEAQAPAGVEAGGRASRRCWTCSRAQLKKIFWGVAVVLCVCSSWAGSTQLAKLTFRKFDAPFTLTWFATNWNFLFFPLYYVGHVCKSTEKQSVKQRYRECCRFFGDNGLTLKVFFTKAAPFGVLWTLTNYLYLHAIKKINTTDVSVLFCCNKAFVFLLSWIVLRDRFMGVRIVAAILAIAGIVMMTYADGFHSHSVIGIALVVASASMSALYKVLFKLLLGSAKFGEAALFLSILGVFNILFITCIPIILYFTKVEYWSSFDDIPWGNLCGFSVLLLTFNIVLNFGIAVTYPTLMSLGIVLSIPVNAVIDHYTSQIVFNGVRVIAIIIIGLGFLLLLLPEEWDVWLIKLLTRLKVRKKEEPAEGAADLSSGPQSKNRRARPSFAR

SEQ ID NO: 2934 - protein, 133 aa, Homo sapiens
MSVWCQDAPCGLCPGRSALAQCSFSVSVTCCLQSSSLAYLGRPLAHGKTLCSSRNNFFFTTEQMTDEVTTLMTILICWWWVGGGLDEDSIGQHSFWPPHCREPQLLWEARVVQGFPLGHQHSNCSSYFWPLEN

SEQ ID NO: 2935 - protein, 212 aa, Homo sapiens [sequence omitted]

SEQ ID NO: 2936 - protein, 251 aa, Homo sapiens
MGVGTKARASHWRRLLSLGATPEEPLLDFKIPDDNFSIPEGEEDLAKAIQMAQEQATDTEILERKTVLPSKHAVPEVIEDFLCNFLIKMGMTRTLDCFQSEWYELIQKGVTELRTVGNVPDVYTQIMLLENENKNLKKDLKHYKQAADKAREDLLKIQKERDFHRMHHKRIVQEKNKLINDLKGLKLHYASYEPTIRVLHEKHHTLLKEKMLTSLERDKVVGQISGLQETLKKLQRGHSYHGPQIKGKCKM

SEQ ID NO: 2937 - protein, 122 aa, Homo sapiens [sequence omitted]

SEQ ID NO: 2938 - protein, 113 aa, Homo sapiens
MGNRLRKWRGSQCGSTHRMFFWFPARIATVVIGGVVAVPMVLSAMGFTAAGIASSSIAAKMMSAAAIANGGGVASGSLVATLQSLGATGLSGLTKFILGSIGSAIAAVIARFY

SEQ ID NO: 2939 - protein, 103 aa, Homo sapiens
MMQKRNCRMILPNGWRSWVFVHHFLSVIGWGLLVGDVNSLALLICHAGKQNSILWFQQNLQVQRCRCWQFGSFLEHLKWWGLNKASRALAASATSQIITGPGC

SEQ ID NO: 2940 - protein, 600 aa, Homo sapiens
MKDIFFQFIIARVRKCYSLSCLHTLPVVPTLRKTERGSYSSYGRESNLQGCHQSLLGGDMDMGNPGTLSPTKPGSQYYQYSSNNPRRRPLHSSAMEVQTKKVRKVPPGLPSSVYAPSASTADYNRDSPGYPSSKPATSTFPSSFFMQDGHHSSDPWSSSSGMNQPGYAGMLGNSSHIPQSSSYCSLHPHERLSYPSHSSADINSSLPPMSTFHRSGTNHYSTSSCTPPANGTDSIMANRGSGAAGSSQTGDALGKALASIYSPDHTNNSFSSNPSTPVGSPPSLSAGTAVWSRNGGQASSSPNYEGPLHSLQSRIEDRLERLDDAIHVLRNHAVGPSTAMPGGHGDMHGIIGPSHNGAMGGLGSGYGTGLLSANRHSLMVGTHREDGVALRGSHSLLPNQVPVPQLPVQSATSPDLNPPQDPYRGMPPGLQGQSVSSGSSEIKSDDEGDENLQDTKSSEDKKLDDDKKDIKSITRSRSSNNDDEDLTPEQKAEREKERRMANNARERLRVRDINEAFKELGRMVQLHLKSDKPQTKLLILHQAVAVILSLEQQVRERNLNPKAACLKRREEEKVSSEPPPLSLAGPHPGMGDASNHMGQM

SEQ ID NO: 2941 - protein, 397 aa, Homo sapiens
MLIHETWASSIEALMRKNKIIVDDAEEADTEPVSGGSPSQAEKCANRLAASRMCSGPTLLVQESLDCPRKDSVTECKQPPVSSLSKTASLTNHSPLDSKKETSSCQDPVPINHKRRSLCSREVPLIQIETDQREACAGEPEPFLSKSSLLEEAEGHSNDKNIPDVVRGGDTAVSACQIHSDSLDTRDVPEAEASTEARAPDEAPNPPSSSEESTGSWTQLANEEDNPDDTSSFLQLSERSMSNGNSSATSSLGIMDLDIYQESMPSSPMINELVEEKKILKGQSESTEAPASGPPTGTASPQRSLLVINFDLEPECPDAELRATLQWIAASELGIPTIYFKKSQENRIEKFLDVVQLVHRKSWKVGDIFHAVVQYCKMHEEQKDGRLSLFDWLLELG

SEQ ID NO: 2942 - protein, 124 aa, Homo sapiens
MQAWPQQRPEGVPPGTAAHPHPPPGTSPLRALGQSLSVPCTVPSRTWDGSVPAPMGHCSSLPRGGAARPHRKRVPAIPREGGRKGSWPGVGLSGSPGSGCCSPVPASASLPHATRSPPSVCGTP

SEQ ID NO: 2943 - protein, 111 aa, Homo sapiens [sequence omitted]

SEQ ID NO: 2944 - protein, 142 aa, Homo sapiens
MPCPAPVWRDLFVFIPLWGPSSGHPNQQPWVAEPSGTEGRQLYLAESPKATGLSKAGERGKLGSGTMVLAPCCSGHVGGSWRGPKWQLLPDYPGLPSPSSCTLLQWDVWPSLWLASGQVPLLKITLWGSWCPLGLPHSAHTI

SEQ ID NO: 2945 - protein, 107 aa, Homo sapiens
MRRSADRRGGKSRPRSSPPSMWWELLRSVHEAVLAAMSRTHLAPLQSGRGVCVCTCVRGTPCFWILPGSSQRDGACRLACGGLLKLPVPRQGLPNLSSRLLPGPGSR

SEQ ID NO: 2946 - protein, 105 aa, Homo sapiens
MKRSLQALYCQLLTVLLTVCCMKRKKKTANPENNLSYWNNTITMDYFNRHAVELPREIQSLETSEDQLSEPRSPANGDYRDTGMVLVNPFCQETLFVGNDQVSEI

SEQ ID NO: 2947 - protein, 512 aa, Homo sapiens [sequence omitted]

SEQ ID NO: 2948 - protein, 128 aa, Homo sapiens
MSLILLCPQRLEGLLSLQAWRNIHANIPAIKLNPFSSEIPCLSPASNFIFLPQATVHLTQGKMKGLPITRTPEGACPEKSWHVTSHIHFLSSCPNLGNFALEYFQESALCFNEVFFRVPMLFFINAAF

SEQ ID NO: 2949 - protein, 119 aa, Homo sapiens
MDQLKRQMDRIKARQQKYKKGKERMLSLTQEPGEGQDMQKLSEEDDEREADKQKAKGKKKQWWRPWVDHASSRFSRSSYNLIDSNPYILDQNSGVPVTHVFHAWFDPCDLIGGRSVGKF

SEQ ID NO: 2950 - protein, 131 aa, Homo sapiens
MEVRLTDLGVFLQDGFPSGRLALLGEPVAEGGGRWSTADLLCLSLGRVLFCHGLTLFSARFLLPSPSTLITVPVLTFLLSLPGLSLFYFFRPAFLAHLFCRRLKFGKPGFHFSPVFSPFSSHFGRERVGKL

SEQ ID NO: 2951 - protein, 127 aa, Homo sapiens [sequence omitted]

SEQ ID NO: 2952 - protein, 118 aa, Homo sapiens
MQFSRRFAVRWKAFICFVLLTLKIKACPSLTASSRKCQNQRPSQGPGRAGGPPGPWHCSYKWRAWPSSLSGTGWPDMEGETRQQPLPPGELCRLQCRGAEGSWEGAMESHPAGYSHIL

SEQ ID NO: 2953 - protein, 219 aa, Homo sapiens
MFSALPALCPWQLPSHPVTPSSKHADSKPAPLTPAYHTLPHPSHHGTPHTTINWGPLEPPKTPKPWSLSCLRPAPPLRPSAALCYKEDLSKSPKTMKKLLPKRKPERKPSDEEFASRKSTAALEEDAQILKVIEAYCTSAKTRQTLNSTWQGTDLMHNHVLADDDQPSLDSLGRRSSLSRLEPSDPSEDSDYDSIWTAHSYRMGSTSRKSCCSYISHQN

SEQ ID NO: 2954 - protein, 499 aa, Homo sapiens [sequence omitted]

SEQ ID NO: 2955 - protein, 132 aa, Homo sapiens [sequence omitted]

SEQ ID NO: 2956 - protein, 118 aa, Homo sapiens
MLRSDDDGVYAVMCGSQARIQHHQLFHLIPHQSFPSDPIWRRISHLRNPRVSYCSCMSSGAHALWTHTALCPPTADNVEPGCRSIRLLQVSSRHCRAFTNPLFTSASRLSTPLSARRI

SEQ ID NO: 2957 - protein, 130 aa, Homo sapiens
MPGIEENDLAKVDDLPPALRKPPISVSQHESHQAISHLPTGQPLSPNMPPDSHINHNGNPGTSKQNPSSPLQRLIPGSNLDSEPRIQTDILKQATKDRVSDFHKLKQNDEERELQMDPADYGKQHFNDVL

SEQ ID NO: 2958 - protein, 107 aa, Homo sapiens
MERREIVLWVAQEIELTCLGIVLLCRGERQVKSIHPVSDLATGWVMGLFPETVVYSHTTVSALNLIRDSLCKWSLGKERSWLETEIWASSTYRCGEQRRLRKKAGNI

SEQ ID NO: 2959 - protein, 354 aa, Homo sapiens
MTALSRSEATEEGGNQQMHRKTASLNSPVSCKEKPDRVEEPPDYSLHWPEGLKGEEIKKCGREGITLNKYNQQYHKLFKDVPLEEVVLKVCSCALQRDFLLQGRLYISPNWLCFHASLFGKDIKVVIPVVSVQMIKKHKMARLLPNGLAITTNTSQKYIFVSLLSRDSVYDLLRRVCTHLQPSSKKSLSVREFSGEPESLEVLIPEMKWRKVCPSSRSLSLPDNIPCIPPSSVDSTDSFFPSRKPPMSEKSRAQVASENGGRWAWPMPGWGPACPKKMPNCSPTAKNAVYEEDELEEEPRSTGELRLWDYRLLKVFFVLICFLVMSSSYLAFRISRLEQQLCSLSWDDPVPGHR

SEQ ID NO: 2960 - protein, 850 aa, Homo sapiens
MKATKDGQCESQDPRIELTLNKPDFTSLIGSQAALIKSGLGFVKSTSWHHSDLLRKGGEESLRAKSEHEQKTSHQLQKAMPFLQNRGPTPKPDLLRENNNPVEFKTTASVLPNQVSVITKQTRPEKVQSAKLEHLRPHRVEPTLVTENSGNKTGMSTIAKCDGERDDTTQNITEVAAVKSISPEVSASRRKLDFNPPGGSSPVENSDCSTNSRLSFSPENILIQNQDIVREAAVQGDGQKQRQPQATDLDSSGTHGSEMLPATEVTVSGGFSVEETSCGDTGRSGGEALAVANDSTSTPQNANGLWKLKSTTPGGALPECFGTTDTTFSSAFCRKHGETQDTSQSSLPGTLHCYTGIREGGDDTEVESEAFSCSEGSEQQDAPDDSQKNLGDTDAAVAEVRPSLEVGYLTSALQDFNISTFSELDRLSTSEVVMFLESCQLGDYSSGDSVSECSSKGTLSKEMNKELKASEIGEKYRKQPCEEETLGTCEEWIESEEDDYSLKNTSQLTQCSLETLSEVLTKIRQELQTNSEDCNGKDTGSLLLLNVNNNMTTENLKEKSPFRETTGSSSHASEPTPQAAALDTEGSSPISGMPQNENPQSRPEARSDAGRQTDGGEEDLPEPVEPSALCSDSVMEPSIEQSSNCEAETTFQCQIATVTSEVINVLINKDQNLVIEKGDNWTIISGVAVLPHVDQVTLCDIPGDIPISQDQGELEAGCIPVTSAEKSPEASHTGPAFQEAPCGNNLSCPQEDVSSSGQSTNFDKSRLRNRPVKPSIWISSQIYDQNFETQIVASDHTYYNSKLEPSGKNKNRSKISNKDQSNKPVKTSASSRVETHQSEVAQSFSGEKAN

SEQ ID NO: 2961 - protein, 191 aa, Homo sapiens
MLWSAVTSLAFSADGHTMLSSGRDKICIIWDLQSCQATRTVPVFESVEAAVLLPEEPVSQLGVKSPGLYFLTAGDQGTLRVWEAASGQCVYTQAQPPGPGQELTHCTLAHTAGVVLTATADHNLLLYEARSLRLQKQFAGYSEEVLDVRFLGPEDSHVVVASNSPCLKVFELQTSACQILHGHTGEWGQPT

SEQ ID NO: 2962 - protein, 110 aa, Homo sapiens
MVGLSLPTVREVRRGNARGHSAGVDPLPTAGAQPLSVDPTGARPLNPALGVLRAPRGALLGGSAAPRVPRSRGPECASPRLESESGGLLRAGGRAPKSALPPMRWPWGRR

SEQ ID NO: 2963 - protein, 870 aa, Homo sapiens [sequence omitted]

SEQ ID NO: 2964 - protein, 129 aa, Homo sapiens [sequence omitted]

SEQ ID NO: 2965 - protein, 216 aa, Homo sapiens
MVTPLLVYSRGAAPPSGGGHSPSWSIPVGLLLHQEIVTPPPGLYPWDSPPSGDGHSPPGLYPWDSPPSGDGHSPPGLYPWDSPPSGDSHSPPGLYPWGSPQSGGGHSPPGLYPWDSPPSGDGHSPSWSIPVGLLLHQEMVTPLLVYTCGILLPQKMVTPPPGLYPWDSPPSEDGHSPSWSIPVGLLLHQEMVTLPLGCSVQKQPLWKTAWNFFLKN

SEQ ID NO: 2966 - protein, 917 aa, Homo sapiens
MFAVHLMAFYFSKLKEDQIKKVDRFLYHMRLSDDTLLDIMRRFRAEMEKGLAKDTNPTAAVKMLPTFVRAIPDGSENGEFLSLDLGGSKFRVLKVQVAEEGKRHVQMESQFYPTPNEIIRGNGIELFEYVADCLADFMKTKDLKHKKLPLGLTFSFPCRQTKLEEGVLLSWTKKFKARGVQDTDVVSRLTKAMRRHKDMDVDILALVNDTVGTMMTCAYDDPYCEVGVIIGTGTNACYMEDMSNIDLVEGDEGRMCINTEWGAFGDDGALEDIRTEFDRELDLGSLNPGKQLFEKMISGLYLGELVRLILLKMAKAGLLFGGEKSSALHTKGKIETRHVAAMEKYKEGLANTREILVDLGLEPSEADCIAVQHVCTIVSFRSANLCAAALAAILTRLRENKKVERLRTTVGMDGTLYKIHPQYPKRLHKVVRKLVPSCDVRFLLSESGSTKGAAMVTAVASRVQAQRKQIDRVLALFQLTREQLVDVQAKIRAELEYGLKKKSHGLATVRMLPTYVCGLPDGTEKGKFLALDLGGTNFRVLLVKIRSGRRSVRMYNKIFAIPLEIMQGTGEELFDHIVQCIADFLDYMGLKGASLPLGFTFSFPCRQMSIDKGTLIGWTKGFKATDCEGEDVVDMLREAIKRRNEFDLDIVAVVNDTVGTMMTCGYEDPNCEIGLIAGTGSNMCYMEDMRNIEMVEGGEGKMCINTEWGGFGDNGCIDDIRTRYDTEVDEGSLNPGKQRYEKMTSGMYLGEIVRQILIDLTKQGLLFRGQISERLRTRGIFETKFLSQIESDRLALLQVRRILQQLGLDSTCEDSIVVKEVCGAVSRRAAQLCGAGLAAIVEKRREDQGLEHLRITVGVDGTLYKLHPHFSRILQETVKELAPRCDVTFMLSEDGSGKGAALITAVAKRLQQAQKEK

SEQ ID NO: 2967 - protein, 1205 aa, Homo sapiens
MWGMLRARYTELSSPFVTESQQDALLQGMVELVKIGKEKLAHGHLKQTKSKVALQAQIENHKVFFQKLVADMLLIQAYSAKILPSLLQNRETFWAEQVTEVKILEEKSRQCGMKLQSLLQKWEEFDENYASLEKDLEILISTLPSVSLVEETEERLVERISFYQQIKRNIGGKHARLYQTLNEGKQLVASVSCPELEGQIAKLEEQWLSLNKKIDHELHRLQALLKHLLSYNRDSDQLTKWLESSQHTLNYWKEQSLNVSQDLDTIRSNINNFFEFSKEVDEKSSLKTAVISIGNQLLHLKETDTATLRASLAQFEQKWTMLITQLPDIQEKLHQLQMEKLPSLKAITEMISWMNNVEHQTSDEDSVHSPSSASQVKHLLQKHKEFRMEMDYKQWIVDFVNQSLLQLSTCDVESKRYERTEFAEHLGEMNRQWYRVHGMLNRKIQHLEQLLESITESENKIQILNNWLEAQEERLKTLQKPESVISVQKLLLDCQDIENQLAIKSKALDELKQSYLTLESGAVPLLEDTASRIDELFQKRSSVLTQVNQLKTSMQSVLQEWKIYDQLYDEVNMMTIRFWYCMEHSKPVVLSLETLRCQVENLQSLQDEAESSEGSWEKLQEVIGKLKGLCPSVAEIIEEKCQNTHKRWTQVNQAIADQLQKAQSLLQLWKAYSNAHGEAAARLKQQEAKFQQLANISMSGNNLAEILPPALQDIKELQHDVQKTKEAFLQNSSVLDRLPQPAESSTHMLLPGPLHSLQRAAYLEKMLLVKANEFEFVLSQFKDFGVRLESLKGLIMHEEENLDRLHQQEKENPDSFLNHVLALTAQSPDIEHLNEVSLKLPLSDVAVKTLQNMNRQWIRATATALERCSELQGIGLNEKFLYCCEKWIQLLEKIEEALKVDVANSLPELLEQQKTYKMLEAEVSINQTIADSYVTQSLQLLDTTEIENRPEFITEFSKLTDRWQNAVQGVRQRKGDVDGLVRQWQDFTTSVENLFRFLTDTSHLLSAVKGQERFSLYQTRSLIHELKNKEIHFQRRRTTCALTLEAGEKLLLTTDLKTKESVGRRISQLQDSWKDMEPQLAEMIKQFQSTVETWDQCEKKIKELKSRLQVLKAQSEDPLPELHEDLHNEKELIKELEQSLASWTQNLKELQTMKADLTRHVLVEDVMVLKEQIEHLHRQWEDLCLRVAIRKQEIEDRLNTWVVFN

SEQ ID NO: 2968 - protein, 258 aa, Homo sapiens
MKSLLNAFTKKEVPFREAPAYSNRRRRPPNTLAAPRVLLRSNSDNNLNASAPDWAVCSTATSHRSLSPQLLQQMPSKPEGAAKTIGSYVPGPRSRSPSLNRLGGAGEDGKRPQPLWHVGSPFALGANKDSLSAFEYPGPKRKLYSAVPGRLFVAVKPYQPQVDGEIPLHRGDRVKVLSIGEGGFWEGSARGHIGWFPAECVEEVQCKPRDSQAETRADRSKKLFRHYTVGSYDSFDTSRLQTHLGVPATLGDSWSLDL

SEQ ID NO: 2969 - protein, 210 aa, Homo sapiens
MSDRYLEQRISIKFCVKLNKSASETHHLLKEAYGDEVMSRARVFDWHKRFKEGREDVRDDARSGRPVTHRTDDNIQKVKDLVCSNRQLTVRMMAEELNLDKETVRLILKENLNMRKISAKVISGVLKGEPKPRKLDFRSDLSKETRKNSSCLRKKVTGSETWSYLQGEAGGEMPLPVSHPRVHYSASQLLQASSSTSLPPRVAENWFTPW

SEQ ID NO: 2970 - protein, 316 aa, Homo sapiens
MDTVNVGKDEKEASEENASSGDSEENTNSDHESEQLGSISVEPGLITKTHRQLCRSPCLEPHILKRNEILQDFKPEESQTTSKEAKKPPDVVREYQTKLEFALRLGYSEEQVQLVLNKLGTDALINDILGELVKLGNKSEADQTVSTINTITRETSSLESQRSESPMQEIVTDDGENLRPIVIDGSNVAMSHGNKEVFSCRGIKLAVDWFLERGHKDITVFVPAWRKEQSRPDALITDQEILRKLEKEKILVFTPSRRVQGRRVVCYDDRFIVKLAFESDGIIVSNDNYRDLANEKPEWKKFIDERLLMYSFVNDK

SEQ ID NO: 2971 - protein, 1289 aa, Homo sapiens
MFSIDKYTGEIQFQQNPSSEYFPIWLQLKVTDQGIPARTTTGLLVIHMEGEDVKISFSHHLYKGLVTENCEAGTSIVTVKAFAPDSIQDSMKYSIFSGNEDGVLSLCSKSGQLTVKEPKFLDFEVRNEVQLIVLAESSGHRAYCKVAVLIQDENDNSPCFEQSIYQASVSESQLYNAHVIQVFATDLDSGLNGLIEYSILSGNQEEAFQIDALSGVITTKAILDYELTSSYSLIVQATDKGMPRLSNTTVIKVQVTDINDNAPAFLPSEAVEITEDSLPGVIVTHVSVHDVDLNSAFIFSFAKESNPGTKFAIDQNTGVVVLVKTLDFEEMTEYELLIQISDSVHYTEGALVVRVLDVNDNPPVFSQDFYQVTVPESIPVGYSVLTLSATDLESNENISYRILSSSKEFSIDPKNGTIFTISPVLLLDTISTTQFLVEASDGGNPDLRALTLVEIGIEDMNNYAPEFTVKSYNLSLSEDALVGSTLVTFSNIDHDWTRENTYVEYSIISGNSQNNFHVETKFFHSEYPYKQVGYLVLLHSLDREASASHELVILASDSGCPPLSSTAVISIQVLDVNDNPPNFSSLSYHTHVKESTPLGSHITVVSANDRDTGSHAEIIYNIISGNEKGHFYLEENTGVLYLIKPLDYEKMTKFTLTVQASDAEKKHFSFAVVFVSVLDDNDHAPQFMFSSFSCIVPENLPISSTICSINALDFDAGPYGELTYSIVSPCFLTHGMSYDHDLFLIDPLTGDIHAKQILDYENGNKYCLTVQAKDKGDATASLVVWVDIEGIDEFEPIFTQDQYFFTLPEKNKDRQLIGRVEASDADAGIDGVILYSLGTSSPFFSVNKTNGNIYLIRALPLIKSQLNKEDTLEMKIIAHSPKSDSKFASCTVFVNVSFSSEGTPLAVFASSFSISLVVSFLVFLILICILIVMILRHKQKDTINNYEEKKTSSLDADLRVTRDASVLKAFQKTDDCSNEVVPVDATPEWLSLISIMEKDIVNLYRHSNSSGHCSVEGETAEDKEIQRINEHPYRKCSDSALSDHESRVPDSGIPRDSDQLSCLSGETDVMVTAETAEASQTFGEGDQGEGCSTTCAQNNVLPQTVQKREAKESILADVRKESVFISGDQEVRCAALSTQTTSDHDGKDNYHWNYLLSWEPKFQPLASVFNDIAKLKDEHLHMPGIPKEKKSFVFPPPLITAVAQPGIKAVPPRMPAVNLGQVPPKHPRSPIPYHLGSLPEGMTPNFSPSLSLLTMQPPALSPLLREGELLGTHISGTCHELKAEDEVQI

SEQ ID NO: 2972 - protein, 129 aa, Homo sapiens [sequence omitted]

SEQ ID NO: 2973 - protein, 236 aa, Homo sapiens [sequence omitted]

SEQ ID NO: 2974 - protein, 224 aa, Homo sapiens
MIVVLSPDYVTEKSISMLEFKLGVMCQNSIATKLIVVEYRPLEHPHPGILQLKESVSFVSWKGEKSKHSGSKFWKALRLALPLRSLSASSGWNESCSSQSDISLDHVQRRRSRLKEPPELQSSERAAGSPPAPGTMSKHRGKSSATCRCCVTYCEGENHLRNKSRAEIHNQPQWETHLCKPVPQESETQWIQNGTRLEPPAPQISALALHHFTDLSNNNDFYIL

SEQ ID NO: 2975 - protein, 184 aa, Homo sapiens [sequence omitted]

SEQ ID NO: 2976 - protein, 281 aa, Homo sapiens
MEGYILSGPSVRQCTANGTWSGTLPNCTIISCGDPGIPANGLRYGDDYVVGQNVSYMCQPGYTMELNGSRIRTCTINGTWSGVMPTCRAVTCPTPPQISNGRLEGTNFDWGFSISYICSPGYELSFPAVLTCVGNGTWSGEVPQCLPKFCGDPGIPAQGKREGKSFIYQSEVSFSCNFPFILVGSSTRICQADGTWSGSSPHCIEPTQTSCENPGVPRHGSQNNTFGFQVGSVVQFHCKKGHLLQGSTTRTCLPDLTWSGIQPECIPTAVNSQKLLLMQMS

SEQ ID NO: 2977 - protein, 903 aa, Homo sapiens
MTTIHSRQMLQEHVSMEFSSSTTHVQTFSQTTKIVGEEVVRRKSSSIVEFFSLVTRSSNIPAGDSVPELVEKPQPVTAPEGDKAVFRARVQGNAKPHISWKRESGIPIKESAKIFYDSINKEHVLKLEPLTSDDSDNYKCIASNDHADAIYTVSLLVTEGQEKMDFKKMLKKRAPPAPKKKQKKVANEKEMLEILSKVPKKDFEKVCMEHGFTDFRGLLRKLKEMKKKVEVEAIRILKPLEDKETKVDTTVVFDCIMELKDPNVKMIWIKGTEPLRIQYSLGKYDVKQMGTKYMLVISNVNMNDAGIYSLSVGDKRMSAELTVLDEPLKFLGEMKPVKVTERQTAVFEIRLSKKEPNFVWKFNGKELKRDDKYEITVSEDGLTHTLKIKDARLSDSGEFSAEAGNLVQKAQLTIDRIPIKFVSNLKNVRVKERSRACLECELTSKDVTLRWKKDGQLLMHGTKYSMNHEGKQAELIIEDAQLSDGGEYTVVAMQDGDPTEYYSTAIVTVEERLATVKSGMSDVHAATGSPAELCVVLNDEKVEGVWLKDGKEITDLPGVQIVKQGAVHKLIFPSMGPEHEGKYTFRAKGTESEASVFIADPPTIDPSVLEALAAHAITVKVGHTAHIKVPFRGKPLPKVTWYKDGMEVTEEERVSMERGEDQALLTISNCVREDSGLILLKLKNDHGSATATLHLSVLEPPGFASQPQVTDVTKEAVTITWNAPTQDGGAPVLGYIVERRKKGSNLWVPVNKDPIQGTKCTVDGLLEDTEYEFRVIAVNKAGPGQPSVPSSSVVAKDPVKPPGLVQDLHVSDSSNSSISLAWREPAEGDPPSGYILEMWAEDTKEWSKCTKIPISGTCYTVGGLIERQKYFFRIRAVNEAGVGEPVELDKGVRAMPPPGLTTT

SEQ ID NO: 2978 - protein, 121 aa, Homo sapiens [sequence omitted]

SEQ ID NO: 2979 - protein, 858 aa, Homo sapiens
MGAMAYPLLLCLLLAQLGLGAVGASRDPQGRPDSPRERTPKGKPHAQQPGRASASDSSAPWSRSTDGTILAQKLAEEVPMDVASYLYTGDSHQLKRANCSGRYELAGLPGKWPALASAHPSLHRALDTLTHATNFLNVMLQSNKSREQNLQDDLDWYQALVWSLLEGEPSISRAAITFSTDSLSAPAPQVFLQATREESRILLQDLSSSAPHLANATLETEWFHGLRRKWRPHLHRRGPNQGPRGLGHSWRRKDGLGGDKSHFKWSPPYLECENGSYKPGWLVTLSSAIYGLQPNLVPEFRGVMKVDINLQKVDIDQCSSDGWFSGTHKCHLNNSECMPIKGLGFVLGAYECICKAGFYHPGVLPVNNFRRRGPDQHISGSTKDVSEEAYVCLPCREGCPFCADDSPCFVQEDKYLRLAIISFQGLCMLLDFVSMLVVYHFRKAKSIRASGLILLETILFGSLLLYFPVVILYFEPSTFRCILLRWARLLGFATVYGTVTLKLHRVLKVFLSRTAQRIPYMTGGRVMRMLAVILLVVFWFLIGWTSSVCQNLEKQISLIGQGKTSDHLIFNMCLIDRWDYMTAVAEFLFLLWGVYLCYAVRTVPSAFHEPRYMAVAVHNELIISAIFHTIRFVLASRLQSDWMLMLYFAHTHLTVTVTIGLLLIPKFSHSSNNPRDDIATEAYEDELDMGRSGSYLNSSINSAWSEHSLDPEDIRDELKKLYAQLEIYKRKKMITNNPHLQKKRCSKKGLGRSIMRRITEIPETVSRQCSKEDKEGADHGTAKGTALIRKNPPESSGNTGKSKEETLKNRVFSLKKSHSTYDHVRDQTEESSSLPTESQEEETTENSTLESLSGKKLT

SEQ ID NO: 2980 - protein, 154 aa, Homo sapiens [sequence omitted]

SEQ ID NO: 2981 - protein, 876 aa, Homo sapiens [sequence omitted]

SEQ ID NO: 2982 - protein, 300 aa, Homo sapiens
MEKSQKINPFILHILQEVDEEIKKGLAAGITLNIAGNNRLVPVERVTGEDFWILSKILKNCLYINGLDVGYNLLCDVGAYYAAKLLQKQLNLIYLNLMFNDIGPEGGELIAKVLHKNRTLKYLRMTGNKIENKGGMFFAAMLQINSSLEKLDLGDCDLGMQSVIAFATVLTQNQAIKAINLNRPILYSEQEESTVHVGRMLKENHCLVALHMCKHDIKNSGIQQLCDALYLNSSLRYLDVSCNKITHDGMVYLADVLKSNTTLEVIDLSFNRIENAGANYLSETLTSHNRSLKALVWFYI

SEQ ID NO: 2983 - protein, 117 aa, Homo sapiens
MALAPAGGSGPAAVSLGRSNWSWLSFMTYLGREVGGEVGWGLPAHPAAPQWDSAPSTSSTPHCRASIPGHSSPSSPGTNCTGTAPDGSLVWGQRLCCAWPRAGLRLVILSPSVPTWG

SEQ ID NO: 2984 - protein, 365 aa, Homo sapiens
MELVQHIGIPASKIICANPCKQIAQIKYAAKHGIQLLSFDNEMELAKVVKSHPSAKMVLCIATDDSHSLSCLSLKFGVSLKSCRHLLENAKKHHVEVVGVSFHIGSGCPDPQAYAQSIADARLVFEMGTELGHKMHVLDLGGGFPGTEGAKVRFEEIASVINSALDLYFPEGCGVDIFAELGRYYVTSAFTVAVSIIAKKEVLLDQPGREEENGSTSKTIVYHLDEGVYGIFNSVLFDNICPTPILQKKPSTEQPLYSSSLWGPAVDGCDCVAEGLWLPQLHVGDWLVFDNMGAYTVGMGSPFWGTQACHITYAMSRVAWEALRRQLMAAEQEDDVEGVCKPLSCGWEITDTLCVGPVFTPASIM

SEQ ID NO: 2985 - protein, 117 aa, Homo sapiens
MHGLHLEMLMAVALPKNLYLKMWKGPRLIQELSGPASNGGISQTNTYDAQYERAIQESLLTSTEGLCPSALSETSRFDNDLQLAMELSAKELEEWELRLQEEEAELQQVLQLSLTDK

SEQ ID NO: 2986 - protein, 494 aa, Homo sapiens
MFTADMKEKFKNKIKLSGIHHDILEGLVNYAYTSQIEITKRNVQSLLEAADLLQFLSVKKACERFLVRHLDIDNCIGMHSFAEFHVCPELEKESRRILCSKFKEVWQQEEFLEISLEKFLFILSRKNLSVWKEEAIIEPVIKWTAHDVENRIECLYNLLSYINIDIDPVYLKTALGLQRSCLLTENKIRSLIYNALNPMHKEISQRSTATMYIIGGYYWHPLSEVHIWDPLTNVWIQGAEIPDYTRESYGVTCLGPNIYVTGGYRTDNIEALDTVWIYNSESDEWTEGLPMLNARYYHCAVTLGGCVYALGGYRKGAPAEEAEFYDPLKEKWIPIANMIKGVGNATACVLHDVIYVIGGHCGYRGSCTYDKVQSYNSDINEWSLITSSPHPEYGLCSVPFENKLYLVGGQTTITECYDPEQNEWREIAPMMERRMECGAVIMNGCIYVTGGYSYSKGTYLQSIEKYDPDLNKWEIVGNLPSAMRSHGCVCVYNV

SEQ ID NO: 2987 - protein, 100 aa, Homo sapiens
MPMITGERAGHMHASMLKGGQNPCLKTTGPVLGAGDIFSQAGCLWVNQHFAVNKILQTRDFENCRSLLCLRIGKRAIFLTQAHHDPHSEMRLTPRVVPFR

SEQ ID NO: 2988 - protein, 489 aa, Homo sapiens
MFLEPQETMPQTSVVFSSILGPSCSGQVQPGMGERGGGAGGGSGDLIFQDGHLISGSLEALMEHLVPTVDYYPDRTYIFTFLLSSRVFMPPHDLLARVGQICVEQKQQLEAGPEKAKLKSFSAKIVQLLKEWTEAFPYDFQDEKAMAELKAITHRVTQCDEENGTVKKAIAQMTQSLLLSLAARSQLQELREKLRPPAVDKGPILKTKPPAAQKDILGVCCDPLVLAQQLTHIELDRVSSIYPEDLMQIVSHMDSLDNHRCRGDLTKTYSLEAYDNWFNCLSMLVATEVCRVVKKKHRTRMLEFFIDVARECFNIGNFNSMMAIISGMNLSPVARLKKTWSKVKTAKFDVLEHHMDPSSNFCNYRTALQGATQRSQMANSSREKIVIPVFNLFVKDIYFLHKIHTNHLPNGHINFKKFWEISRQIHEFMTWTQVECPFEKDKKIQSYLLTAPIYSEEALFVASFESEGPENHMEKDSWKTLRTTLLNRA

SEQ ID NO: 2989 - protein, 221 aa, Homo sapiens
MRDEVGAHKPLDSLILDQNLSVNAEGKLGRCFHELLKLYMWKITRFCISRRLITFNEADESVNYKTGPKPVRFLGPSTSTQIKVKNSASVTVSPASAIQTSAGATANRFQSGSRRKAAQRSAPSRATALVGTGAPGHPQASPGAASAENGGTHLPPAKVLLSDKKPTPQRVIKLKRTPLCATAPCLPSPTATRQANSLKPLPGEAARALGVRTENGKNKGN

SEQ ID NO: 2990 - protein, 242 aa, Homo sapiens
MDMAQEPVTFRDVAIYFSREEWACLEPSQRALYRDVMLDNFSSVAALGFCSPRPDLVSRLEQWEEPWVEDRERPEFQAVQRGPRPGARKSADPKRHCDHPAWAHKKTHVRRERAREGSSFRKGFRLDTDDGQLPRAAPERTDAKPTAFPCQVLTQRCGRRPGRRERRKQRAVELSFICGTCGKALSCHSRLLAHQTVHTGTKAFECPECGQTFRWASNLQRHQKNHTREKPFCCEACGQASA

SEQ ID NO: 2991 - protein, 127 aa, Homo sapiens [sequence omitted]

SEQ ID NO: 2992 - protein, 116 aa, Homo sapiens [sequence omitted]

SEQ ID NO: 2993 - protein, 253 aa, Homo sapiens [sequence omitted]

SEQ ID NO: 2994 - protein, 351 aa, Homo sapiens
MSPRMRHICYFLDYGALSLYSLGCAFPYAAYSMPASWLHGHLHQFFVPAAALNSFLCTGLSCYSRFLELESPGLSKVLRTGAFAYPFLFDNLPLFYRLGLCWGRGHGCGQEALSTSHGYHLFCALLTGFLFASHLPERLAPGRFDYIGEGTPGPAREEAGADAFPEHRMNWATATSYSTSVQCWAPTSSWRQCWLIWDHAEPGWPHRNLPWAWQAQWPHWSWLQLGTYSLLLLSQPPCFGPPVHALCCRVAHWRGVPRPNNSEAPSLTLSWRGQRPGPSADEEPRFGPNQVGTHLSLEPTGAEERGHRREGREEEGCLGGLAECERDREGALDGSGRSAEGLRGEMHACPG

SEQ ID NO: 2995 - protein, 146 aa, Homo sapiens
MFLTVFLSSQITFDNKAHRGRIKISLDNDISIRECKDWHVSGSIQKNTHYMMIFDAFVILTCLVSLILCIRSVIRGLQLQQEFVNFFLLHYKKEVSVSDQMEFVNGWYIMIIISDILTIIGSILKMEIQAKVIFFLIMLLLVSDLH

SEQ ID NO: 2996 - protein, 246 aa, Homo sapiens
MGEPGQASEEFQPLARPWRATLAAEELVSHRSPGEPQETCSGTEVERPRQTGPGLPREGARGHMDLSSSEPSQDIEGPGLSILPARDATFSTPSVRQPDPSAWLSSGPELTGMPRVRLAAPLAVLPMEPLPPEPVRPAALLTPEASSVGGPDQARYLESAPGWPVGQEEWGVAHTSSPPSTQTLSLWAPTGVLLPSLVELEYPFQAGRGASLQQELTEPTLALSAESHRPPELQDSVEGLSERPSR

SEQ ID NO: 2997 - protein, 159 aa, Homo sapiens [sequence omitted]

SEQ ID NO: 2998 - protein, 1018 aa, Homo sapiens [sequence omitted]

SEQ ID NO: 2999 - protein, 104 aa, Homo sapiens
MLPPPLRACGSRLSLPCAALSPRFPREPSNRFSAREKDGSGGKSEGVEREVRAFAFSPHSSGGVRSSGWNVLAAAVTAATAREAPEPYTLQLERKGWPRWERLE

SEQ ID NO: 3000 - protein, 107 aa, Homo sapiens [sequence omitted]

SEQ ID NO: 3001 - protein, 231 aa, Homo sapiens
MSFNLQSSKKLFIFLGKSLFSLLEAMIFALLPKPRKNVAGEIVLITGAGSGLGRLLALQFARLGSVLVLWDINKEGNEETCKMAREAGATRVHAYTCDCSQKEGVYRVADQVKKEVGDVSILINNAGIVTGKKFLDCPDELMEKSFDVNFKAHLWTYKAFLPAMIANDHGHLVCISSSAGLSGVNGLADYCASKFAAFGFAESVFVETFVQKQKGIKTTIVCPFFYKNWNV

SEQ ID NO: 3002 - protein, 305 aa, Homo sapiens
MGPCTFRPPRAGPSLGSGDLGSSPLSPPPADPCPTDCGRRKLPVDRIVGGRDTSLGRWPWQVSLRYDGAHLCGGSLLSGDWVLTAAHCFPERNRVLSRWRVFAGAVAQASPHGLQLGVQAVVYHGGYLPFRDPNSEENSNDIALVHLSSPLPLTEYIQPVCLPAAGQALVDGKICTVTGWGNTQYYGQQAGVLQEARVPIISNDVCNGADFYGNQIKPKMFCAGYPEGGIDACQGDSGGPFVCEDSISRTPRWRLCGIVSWGTGCALAQKPGVYTKVSDFREWIFQAIKVKVGSRWEPGWGRLGV

SEQ ID NO: 3003 - protein, 290 aa, Homo sapiens
MPRTEFARLNGDVRLLTPEAVEGWSDLVHCPSQRLLDRLVRRYAETKDSGSFLLRNLKDSERMQLLLTLAFNPEPLVLQSFPSDEGWPFAKYLGACGRMVAVNYVGEELWSYFNAPWEKRVDLAWQLMEIAEQLTNNDFEFALYLLDVSFDNFAVGPRDGKVIIVDAENVLVADKRLIRQNKPENWDVWYESKFDDCDKEACLSFSKEILCARATVDHNYYAVCQNLLSRHATWRGTSGGLLHDPPSEIAKDGRLEALLDECANPKKRYGRFQAAKELREYLAQLSNNVR

SEQ ID NO: 3004 - protein, 110 aa, Homo sapiens
MRLSCPRAPGWMGPFFPYSLLSFFPCSFSSPSFIFLLLILKTGCSLFPCCPISPLCPYFSQSLSPLKSRAGRCYWCFFTLGPSSIFVFSVYPLPDTSFSPSLGPKAENQC

SEQ ID NO: 3005 - protein, 130 aa, Homo sapiens [sequence omitted]

SEQ ID NO: 3006 - protein, 731 aa, Homo sapiens
MGLAMVEAISYVREKTKTGVDMRVGVHTGTVLGGVLGQKRWQYDVWSTDVTVANKMEAGGIPGGSKIEERLYSCVVAPTLRLRWERVHISQSTMDCLKGEFDVEPGDGGSRCDYLEEKGIETYLIIASKPEVKKTATQNGLNGSALPNGAPASSKSSSPALIETKEPNGSAHSSGSTSEKPEEQDAQADNPSFPNPRRRLRLQDLADRVVDASEDEHELNQLLNEALLERESAQVVKKRNTFLLSMRFMDPEMETRYSVEKEKQSGAAFSCSCVVLLCTALVEILIDPWLMTNYVTFMVGEILLLILTICSLAAIFPRAFPKKLVAFSTWIDRTRWARNTWAMLAIFILVMANVVDMVSHMVKLTLMLLVAGAVATINLYAWRPVFDEYDHKRFREHDLPMVALEQMQGFNPGLNGTDRLPLVPSKYSMTVMVFLMMLSFYYFSRHVEKLARTLFLWKIEVHDQKERVYEMRRWNEALVTNMLPEHVARHFLGSKKRDEELYSQTYDEIGVMFASLPNFADFYTEESINNGGIECLRFLNEIISDFDSLLDNPKFRVITKIKTIGSTYMAASGVTPDVNTNGFASSNKEDKSERERWQHLADLADFALAMKDTLTNINNQSFNNFMLRIGMNKGGVLAGVIGARKPHYDIWGNTVNVASRMESTGVMGNIQVVEETQVILREYGFRFVRRGPIFVKGKGELLTFFLKGRDKLATFPNGPSVTLPHQVVDNS

SEQ ID NO: 3007 - protein, 128 aa, Homo sapiens [sequence omitted]

SEQ ID NO: 3008 - protein, 133 aa, Homo sapiens
MPLCLSSTDHSAAISQTLPAGTEPCLVTALPNSQAAKMRPQVHLGRQMLVLFVTTFAKTCTLLLTSFVRMVDTKGPWKSTFKKLCGGIKLTEAEMLVPCSNQVSLVFPTVICIWPESPQAATPTVQHVEGRSL

SEQ ID NO: 3009 - protein, 111 aa, Homo sapiens
MRKQWLQRLNNLSSIAQLTRAHCPKGVSLPGPHAEACSRVNVCTGKNPHRPPESCQPCQASVRSLGPSSQAGRSTICPLTLGQRCSLHPSRQKAGGITAEFTATEGTTVGF

SEQ ID NO: 3010 - protein, 264 aa, Homo sapiens
MLGAETEEKLFDAPLSISKREQLEQQVPENYFYVPDLGQVPEIDVPSYLPDLPGIANDLMYIADLGPGIAPSAPGTIPELPTFHTEVAEPLKADLQDGVLTPPPPPPPPPPAPEVLASAPPLPPSTAAPVGQGARQDDSSSSTSPSVQGAPREVVDPSGGWATLLESIRQAGGIGKAKLRSMKERKLEKKKQKEQEQVRATSQGGHLMSDLFNKLVMRRKGISGKGPGAGEGPGGAFARVSDSIPPVPPPQQPQAEEDEDDWES

SEQ ID NO: 3011 - protein, 172 aa, Homo sapiens
MHSSLGNRARLCLKKKKKKGGRKEGRKEGRKERKQCCHSHPRATLPFILFPTTLGRKGVALNTAILELLVVLPRVQVSRLGGLELSRTVGHFDGLASGFWAILMALPLSAVAHSVNPVALGKARSATSFPPLQEGGGSAVPRGGGVHHQGRPGGNSQRPLPWAHLAPVPGPC

SEQ ID NO: 3012 - protein, 634 aa, Homo sapiens
MVELLDLYQLEDEAYSSLAEATTELYQYLLQPFRDMRELAMLRRQQIKISMENDYLGPRRIESLQKEDADWQRKAHMAVLSIQDLTVKYFEITAKAQKAVYDRMRADQKKFGKASWAAAAERMEKLQYAVSKETLQMMRAKEICLEQRKHALKEEMQSLRGGTEAIARLDQLEADYYDLQLQLYEVQFEILKCEELLLTAQLESIKRLISEKRDEVVYYDTYESMEAMLEKEEMAASAYLQREELQKLQQKARQLEARRGRVSAKKSYLRNKKEICIAKHNEKIQQRTRIEDEYRTHHTVQLKREKLHDEEERKSAWVSQERQRTLDRLRTFKQRYPGQVILKSTRLRLAHARRKGAASPVLQEDHCDSLPSVLQVEEKTEEVGEGRVKRGPSQTTEPQSLVQLEDTSLTQLEATSLPLSGVTSELPPTISLPLLNNNLEPCSVTINPLPSPLPPTPPPPPPPPPPPPPPPLPVAKDSGPETLEKDLPRKEGNEKRIPKSASAPSAHLFDSSQLVSARKKLRKTAEGLQRRRVSSPMDEVLASLKRGSFHLKKVEQRTLPPFPDEDDSNNILAQIRKGVKLKKVQKDVLRESFTLLPDTDPLTRSIHEALRRIKEASPESEDEEEALPCTDWEN

SEQ ID NO: 3013 - protein, 782 aa, Homo sapiens [sequence omitted]

SEQ ID NO: 3014 - protein, 389 aa, Homo sapiens
MPGVANSGPSTSSRETANPCSRKKVHFGSIHDAVRAGDVKQLSEIVCLHWLLWHGADITHVTTRGWTASHIAAIRGQDACVQALIMNGANLTAQDDRGCTPLHLAATHGHSFTLQIMLRSGVDPSVTDKREWRPVHYAAFHGRLGCLQLLVKWGCGIEDVDYNGNLPVHLAAMEGHLHCFKFLVSRMSSATQVLKAFNDNGENVLDLAQRFFKQNILQFIQGAEYEGKDLEDQETLAFPGHVAAFKGDLGMLKKLVEDGVININERADNGSTPMHKAAGQGHIECLQWLIKMGADSNITNKAGERPSDVAKRFAHLAAVKLLEELQKYDIDDENEIDENDVKYFIRHGVEGSTDAKDDLCLSDLDKTDARRPSKNCRASWSMNDYVEKN

SEQ ID NO: 3015 - protein, 247 aa, Homo sapiens
MDVAYLNGYIYILGGRDPITGVKLKEVECYNVKRNQWALVAPLPHSFLSFDLMVIRDYLYALNSKRMFCYDPSHNMWLKCVSLKRNDFQEACVFNEEIYCICDIPVMKVYNPVRAEWRQMNNIPLVSETNNYRIIKHGQKLLLITSRTPQWKKNRVTVYEYDIRGDQWINIGTTLGLLQFDSNFFCLSARVYPSCLEPGQSFLTEEEEIPSESSTEWDLGGFSEPDSESGSSSSLSDDDFWVRVAPQ

SEQ ID NO: 3016 - protein, 351 aa, Homo sapiens; identical to SEQ ID NO: 2994

SEQ ID NO: 3017 - protein, 118 aa, Homo sapiens
MQSLRPEQTRGLLEPERTKTLLPRESRAWEKPPHPACTKDWEAVEVGASSHDSDEKDLSSQETGLSQEWSSVEEDDESEGSQGFVEWSKAPQQTTIVLVVCVLFLFLVLTGMPMMFHI

SEQ ID NO: 3018 - protein, 376 aa, Homo sapiens
MPLQVSDYSWQQTKTAVFLSLPLKGVCVRDTDVFCTENYLKVNFPPFLFEAFLYAPIDDESSKAKIGNDTIVFTLYKKEAAMWETLSVTGVDKEMMQRIREKSILQAQERAKEATEAKAAAKREDQKYALSVMMKIEEEERKKIEDMKENERIKATKALEAWKEYQRKAEEQKKIQREEKLCQKEKQIKEERKKIKYKSLTRNLASRNLAPKGRNSENIFTEKLKEDSIPAPRSVGSIKINFTPRVFPTALRESQVAEEEEWLHKQAEARRAMNTDIAELCDLKEEEKNPEWLKDKGNKLFATENYLAAINAYNLAIRLNNKMPLLYLNRAACHLKLKNLHKAIEDSSKAYRIMKRHLRLIHPTKLYKLMLRRFGM

SEQ ID NO: 3019 - protein, 115 aa, Homo sapiens [sequence omitted]

SEQ ID NO: 3020 - protein, 296 aa, Homo sapiens [sequence omitted]

SEQ ID NO: 3021 - protein, 213 aa, Homo sapiens
MGAGEGSPGQPRAPHSGAEQDTTATVPGPGAKGSEVGAAFWALWEWGPGRGFLAAPGIHEFFLLLLLVFLLEATIAILFFAYTDKIDRYAQQDLKKGLHLYGTQGNVGLTNAWSIIQTDFRCCGVSNYTDWFEVYNATRVPDSCCLEFSESCGLHAPGTWWKAPCYETVKVWLQENLLAVGIFGLCTALVQILGLTFAMTMYCQVVKADTYCA

SEQ ID NO: 3022 - protein, 126 aa, Homo sapiens [sequence omitted]

SEQ ID NO: 3023 - protein, 129 aa, Homo sapiens
MLVLHPLTRHLALGISPNAVLPPVPRPHNSPWCVMFPFPCPCVLIVQFPPMSENIRCLVFCPCDSLLRMIVSSFIHVPTKDMNSSFFMAAYYSMVYMCHIFLIQSIVGWFHVFAIVNSAGINIRVHVSL

SEQ ID NO: 3024 - protein, 1043 aa, Homo sapiens
MNRGVVEETSNNAEPGRTSNFDRYVHATKMQPQSSGSLRSNAGAEKGKEIAAKLNIHRVHGQLRGLDTTDIGTCAITAIPFEKSKVLFTLEELDEFTFVDETDQQAVPDVTRIGPSQEKWGWIMFECGLENLTIKGGRQSGAVLYNSFGIMGKASDTERGGVLTSNNSSDSPTGSGYNTDVSDDNLPCDRTSPSSDLNGNSVSDEQDEGVESDDLKKDLPLMPPPPDSCSMKLTIKEIWFSFAAPTNVRSHTHAFSRQLNLLSTATPAVGAWLVPIDQLKSSLNKLETEGTLRICAVMGCIMTEALENKSVHFPLRSKYNRLTKVARFLQENPSCLLCNILHHYLHQANYSIIDDATMSDGLPALVTLKKGLVALARQWMKFIVVTPAFKGVSLHRPAQPLKPQIAMDHEHEDGLGLDNGGGLQSDTSADGAEFEFDAATVSEHTMLLEGTANRPPPGSSGPVTGAEIMRKLSKTHTHSDSALKIKGIHPYHSLSYTSGDTATDSPVHVGRAGMPVKDSPRKESLLSYLTGSFPSLHNLLEGTPQRSSAAVKSSSLTRTGNTVATDMLSEHPLLSEPSSVSFYNWMSNAVGNRGSVLQESPVTKSGHNSLPTGVAPNLPTIPSASDFNTVLSSDQNTLDGTHSQHSTSQDDVAGVEEANQGFPAVQLADAQVVFKPLLSHTGIQSQDTMPFCYRMYFGEHLSFSGTLDCLRADIVDSDTAKERKGKRARRQGHVNLPPLEFKPALMLGTFSISAVVMEKSVCTPQNSTSALSFHDLSKRYYNTFHCNFTISCQSISQHVDMALVRLIHQFSTMIDDIKATQTDIKLSRYTAGSASPTPTFKTRKHRDFRSSDFSRSSRGSLNGGNRVNNAKNKRTNNENNKKESRNKNSLGRSERRTSKVSRKGSKDVVDHMTIHMDDSDSITVSEQSEPSAECWQNMYKLLNFYSLISDPTGILEKSSETFGPAGVRSPTEPTCKVVFENEQDNSSLTKTQRKRSLVTSEPQHVTLIVFGIGMVNRTHLEADIGGLTMESELKRIHGSFTLK

SEQ ID NO: 3025 - protein, 781 aa, Homo sapiens [sequence omitted]

SEQ ID NO: 3026 - protein, 286 aa, Homo sapiens
MDPKTASETETDICAEWEIKTITSALKTYLRMLPGPLMMYQFQRSFIKAAKLENQESRVSEIHSLVHRLPEKNRQMLQLLMNHLANVANNHKQNLMTVANLGVVFGPTLLRPQEETVAAIMDIKFQNIVIEILIENHEKIFNTVPDMPLTNAQLHLSRKKSSDSKPPSCSERPLTLFHTVQSTEKQEQRNSIINSSLESVSSNPNSILNSSSSLQPNMNSSDPDLAVVKPTRPNSLPPNPSPTSPLSPSWPMFSAPSSPMPTSSTSSDSSLRITWSSSNRGPQQNC

SEQ ID NO: 3027 - protein, 109 aa, Homo sapiens
MSLTRRLWASGLYVSLHLGLLMSKPEGSGTRTEAGTVGGAGGPHLLNVANPVPDVVEGLLVGDVVDQHDALRGERRHRCLIGCRLWKGGLSGTREQWWGAQHPLHSQAH

SEQ ID NO: 3028 - protein, 508 aa, Homo sapiens [sequence omitted]

SEQ ID NO: 3029 - protein, 138 aa, Homo sapiens
MGGTKRGIKKLVNVCLKHPKNTSLSQQLVFAKINKILISKTTKSTNLKGLKCLPPLSVSIHPTFIYYKHNTTLRIVFGTYFDFFPYRKNKDQAFEGEDWESSLNVYIQNYIIFAHSVDFLKFKNTYTKSTYGIHILTA

SEQ ID NO: 3030 - protein, 172 aa, Homo sapiens [sequence omitted]

SEQ ID NO: 3031 - protein, 342 aa, Homo sapiens [sequence omitted]

SEQ ID NO: 3032 - protein, 218 aa, Homo sapiens
MANVELSSLARLPSLNKLRKLELSDNIISGGLEVLAEKCPNLTYLNLSGNKIKDLSTVEALQNLKNLKSLDLFNCEITNLEDYRESIFELLQQITYLDGFDQEDNEAPDSEEEDDEDGDEDDEEEEENEAGPPEGYEEEEEEEEDEDEDEDEDEAGSELGEGEEEVGLSYLMKEEIQDEEDDDDYVEEGEEEEEEEEGGLRGEKRKRDAEDDGEEEDD

SEQ ID NO: 3033 - protein, 949 aa, Homo sapiens [sequence omitted]

SEQ ID NO: 3034 - protein, 867 aa, Homo sapiens [sequence omitted]

SEQ ID NO: 3035 - protein, 228 aa, Homo sapiens [sequence omitted]

SEQ ID NO: 3036 - protein, 198 aa, Homo sapiens [sequence omitted]

SEQ ID NO: 3037 - protein, 956 aa, Homo sapiens
MASSPELPTEDEQGSWGIDDLHISLQAEQEDTQKKAFTCWINSQLARHTSPSVISDLFTDIKKGHVLLDLLEVLSGQQLPRDKGSNTFQCRINIEHALTFLRNRSIKLINIHVTDIIDGNPSIILGLIWTIILHFHIEKLAQTLSCNYNQPSLDDVSVVDSSPASSPPAKKCSKVQARWQMSARKALLLWAQEQCATYESVNVTDFKSSWRNGMAFLAIIHALRPDLIDMKSVKHRSNKDNLREAFRIAEQELKIPRLLEPEDVDVVDPDEKSIMTYVAQFLQYSKDAPGTGEEAQGKVKDAMGWLTLQKEKLQKLLKDSENDTYFKKYNSLLSFMESFNEEKKSFLDVLSIKRDLDELDKDHLQLREAWDGLDHQINAWKIKLNYALPPPLHQTEAWLQEVEELMDEDLSASQDHSQAVTLIQEKMTLFKSLMDRFEHHSNILLTFENKDENHLPLVPPNKLEEMKRRINNILEKKFILLLEFHYYKCLVLGLVDEVKSKLDIWNIKYGSRESVELLLEDWHKFIEEKEFLARLDTSFQKCGEIYKNLAGECQNINKQYMMVKSDVCMYRKNIYNVKSTLQKVLACWATYVENLRLLRACFEETKKEEIKEVPFETLAQWNLEHATLNEAGNFLVEVSNDVVGSSISKELRRLNKRWRKLVSKTQLEMNLPLMIKKQDQPTFDNSGNILSKEEKATVEFSTDMSVELPENYNQNIKAGEKHEKENEEFTGQLKVAKDVEKLIGQVEIWEAEAKSVLDQDDVDTSMEESLKHLIAKGSMFDELMARSEDMLQMDIQNISSQESFQHVLTTGLQAKIQEAKEKVQINVVKLIAALKNLTDVSPDLDIRLKMEESQKELESYMMRAQQLLGQRESPGELISKHKEALIISNTKSLAKYLKAVEELKNNVTEDIKMSLEEKSRDVCAKWESLHHELSLYVQQLKIDIEKGKLSDNILKL

SEQ ID NO: 3038 - protein, 154 aa, Homo sapiens
MNQGRTWLYLWGVSLDQWWAPGPALLLEWRLRTTCPPAGFGYKLCASAEQLCPLLSCAVNQGSLWLSGARPRSLVWHAGPLPGGPLPGGPLLTLPGPAPTPCLSSQLPWPGTSHASLRVPPAMACAHHPAWKAGISCVSCCAGPAQILSPPVLP

SEQ ID NO: 3039 - protein, 194 aa, Homo sapiens [sequence omitted]

SEQ ID NO: 3040 - protein, 988 aa, Homo sapiens
MARGRLGIVVSTCLRGRGPRAGLSGRGGGWVAERPGSPRRFRSQAGSGGGGAPRPTRARRSGKKGGASGCARSGPAVAAEMEGGGRDKAPVQPQQSPAAAPGGTDEKPSGKERRDAGDKDKEQELSEEDKQLQDELEMLVERLGEKDTSLYRPALEELRRQIRSSTTSMTSVPKPLKFLRPHYGKLKEIYENMAPGENKRFAADIISVLAMTMSGERECLKYRLVGSQEELASWGHEYVRHLAGEVAKEWQELDDAEKVQREPLLTLVKEIVPYNMAHNAEHEACDLLMEIEQVDMLEKDIDENAYAKVCLYLTSCVNYVPEPENSALLRCALGVFRKFSRFPEALRLALMLNDMELVEDIFTSCKDVVVQKQMAFMLGRHGVFLELSEDVEEYEDLTEIMSNVQLNSNFLALARELDIMEPKVPDDIYKTHLENNRFGGSGSQVDSARMNLASSFVNGFVNAAFGQDKLLTDDGNKWLYKNKDHGMLSAAASLGMILLWDVDGGLTQIDKYLYSSEDYIKSGALLACGIVNSGVRNECDPALALLSDYVLHNSNTMRLGSIFGLGLAYAGSNREDVLTLLLPVMGDSKSSMEVAGVTALACGMIAVGSCNGDVTSTILQTIMEKSETELKDTYARWLPLGLGLNHLGKGEAIEAILAALEVVSEPFRSFANTLVDVCAYAGSGNVLKVQQLLHICSEHFDSKEKEEDKDKKEKKDKDKKEAPADMGAHQGVAVLGIALIAMGEEIGAEMALRTFGHLLRYGEPTLRRAVPLALALISVSNPRLNILDTLSKFSHDADPEVSYNSIFAMGMVGSGTNNARLAAMLRQLAQYHAKDPNNLFMVRLAQGLTHLGKGTLTLCPYHSDRQLMSQVAVAGLLTVLVSFLDVRNIILGKSHYVLYGLVAAMQPRMLVTFDEELRPLPVSVRVGQAVDVVGQAGKPKTITGFQTHTTPVLLAHGERAELATEEFLPVTPILEGFVILRKNPNYDL

SEQ ID NO: 3041 - protein, 515 aa, Homo sapiens
MEWKLERTAPRRVRTEEEMLWESIMRVLSKDLKQKRSQDSANVLDSVNATYSDFKSNFAKRLSAEVPVASSPITTRWQQSQTRALSSDSFGEEQSTTYLPEASGSVLKTPPEKETLTLGSCKEQLKTPSKGISETSNSALHFCKAPHAMDRDWKESVASKGQKCLKQLFVTQNVVQQANGKMQLCEQSECVWKGCKDGVRDESFHLKSSGDINDSILQPEVKIHITGLRNDYYLNILDWSFQNLVAIALGSAVYIWNGENHNGIENIDLSLTCNYISSVSWIKEGTCLAVGTSEGEVQLWDVVTKKRLRNMLGHLSVVGALSWNHFILSSGSRLGRVYHHDVRVAQHHVGTLRHKQAVCALKWSPDGRLLSSGCSDGLLTIWPHDPGASAQGQPLKVITQSTAVKAMDWCPWQSGVLAIGGGMKDGRLHILDINAGKSIQTPSTNSQICSLIWLPKTKEIATGQGTPKNDVTVWTCPTVSRSGHRGRVLHLALSPDQTRVFSAAADGTASVWNCY

SEQ ID NO: 3042 - protein, 696 aa, Homo sapiens [sequence omitted]

SEQ ID NO: 3043 - protein, 778 aa, Homo sapiens
MSLPDPSWDFSPPSFLETSSPKLPSWRPPRSRPRWGQSPPPQQRSDGEEEEEVASFSGQILAGELDNCVSSIPDFPMHLACPEEEDKATAAEMAVPAAGDESISSLSELVRAMHPYCLPNLTHLASLEDELQEQPDDLTLPEGCVVLEIVGQAATAGDDLEIPVVVRQVSPGPRPVLLDDSLETSSALQLLMPTLESETEAAVPKVTLCSEKEGLSLNSEEKLDSACLLKPREVVEPVVPKEPQNPPANAAPGSQRARKGRKKKSKEQPAACVEGYARRLRSSSRGQSTVGTEVTSQVDNLQKQPQEELQKESGPLQGKGKPRAWARAWAAALENSSPKNLERSAGQSSPAKEGPLDLYPKLADTIQTNPIPTHLSLVDSAQASPMPVDSVEADPTAVGPVLAGPVPVDPGLVDLASTSSELVEPLPAEPVLINPVLADSAAVDPAVVPISDNLPPVDAVPSGPAPVDLALVDPVPNDLTPVDPVLVKSRPTDPRRGAVSSALGGSAPQLLVESESLDPPKTIIPEVKEVVDSLKIESGTSATTHEARPRPLSLSEYRRRRQQRQAETEERSPQPPTGKWPSLPETPTGLADIPCLVIPPAPAKKTALQRSPETPLEICLVPVGPSPASPSPEPPVSKPVASSPTEQVPSQEMPLLARPSPPVQSVSPAVPTPPSMSAALPFPAGGLGMPPSLPPPPLQPPSVWYSWCLCRASHLQCALGTPSCPSLTLQFHMYLWALGMGPRASTCSILVYCSPTSFASSLHWESCSPFPYSRGESC

SEQ ID NO: 3044 - protein, 136 aa, Homo sapiens
MWDSGPFCQQKNRAPWSLLPAALGTLEIPPQAVFFPFLSVPNACCSVPRGTGSSGSVSPGDWSHWSPGAWESKFDLAICLFWGVRAGCPQRGLSMEPGFHVPLVPAQGEEAEGKGGKQSGGEFHFCSLFSVCFLMF

SEQ ID NO: 3045 - protein, 170 aa, Homo sapiens [sequence omitted]

SEQ ID NO: 3046 - protein, 595 aa, Homo sapiens
MDPVAFKDVAVNFTQEEWALLDISQRKLYREVMLETFRNMTSLGKRWKDQNIEYEHQNPRRNFRSLIEEKVNEIKDDSHCGETFTPVPDDRLNFQEKKASPEVKSCESFVCGEVGLGNSSFNMNIRGDIGHKAYEYQEYGPKPCKCQQPKKAFRYRPSFRTQERDHTGEKPNACKVCGKTFISHSSVRRHMVMHSGDGPYKCKFCGKAFHCLRLYLIHERIHTGEKPCECKQCGKSFSYSATHRIHKRTHTGEKPYEYQECGKAFHSPRSYRRHERIHMGEKAYQCKECGKAFTCPRYVRIHERTHSRKNLYECKQCGKALSSLTSFQTHVRLHSGERPYECKICGKDFCSVNSFQRHEKIHSGEKPYKCKQCGKAFPHSSSLRYHERTHTGEKPYECKQCGKAFRSASHLRVHGRTHTGEKPYECKECGKAFRYVNNLQSHERTQTHIRIHSGERRYKCKICGKGFYCPKSFQRHEKTHTGEKLYECKQRSVVPSVVPVPFDIMKGLTLERSPINASNVGKPSELCQSFECMVGLTLKRNPMSVSNDGKPSDLPHTFEYVVGHTMERNPMHVRNVGNPSDLPRTFEFMKGHKHT

SEQ ID NO: 3047 - protein, 145 aa, Homo sapiens
MEKLTEKQTEVETVMSEVSGFPMPQLDPRVLEVYRGVREVLSKYRSGKLPKAFKIIPALSNWEQILYVTEPEAWTAAAMYQATRIFASNLKERMAQRFYNLVLLPRVRDDVAEYKRLNFHPIAFGFGILSFFSGKLNFLGQVFIS

SEQ ID NO: 3048 - protein, 472 aa, Homo sapiens
MTANGTAEAVQIQFGLINCGNKYLTAEAFGFKVNASASSLKKKHLGRYLAADKDGNVTCEREVPGPDCRFLIVAHDDGRWSLQSEAHRRYFGGTEDRLSCFAQTVSPAEKWSVHIAMHPQVNIYSVTRKRYAHLSARPADEIAVDRDVPWGVDSLITLAFQDQRYSVQTADHRFLRHDGRLVARPEPATGYTLEFRSGKVAFRDCEGRYLAPSGPSGTLKAGKATKVGKDELFALEQSCAQVVLQAANERNVSTRQGMDLSANQDEETDQETFQLEIDRDTKKCAFRTHTGKYWTLTATGGVQSTASSKNASCYFDIEWRDRRITLRASNGKFVTSKKNGQLAASVETAGDSELFLMKLINRPIIVFRGEHGFIGCRKVTGTLDANRSSYDVFQLEFNDGAYNIKDSTGKYWTVGSDSAVTSSGDTPVDFFFEFCDYNKVAIKVGGRYLKGDHAGVLKASAETVDPASLWEY

SEQ ID NO: 3049 - protein, 442 aa, Homo sapiens
MQVHSGETEILRKAVEDYFCFCYGKALGTTVMVPVPYEKMLRDQSAVVVQGLPEGVAFQHPENYDLATLKWILENKAGISFIINRPFLGPESQLGGPGMATDAERSIVSPSESCGPINVKTEPMEDSGISLKAEAVSVKKESEDPNYYQYNMQGSHPSSTSNEVIEMELPMEDSTPLVPSEEPNEDPEAEVKIEGNTNSSSVTNSAAGVEDLNIVQVTVPDNEKERLSSIEKIKQLREQVNDLFSRKFGEAIGVDFPVKVPYRKITFNPGCVVIDGMPPGVVFKAPGYLEISSMRRILEAAEFIKFTVIRPLPGLELSNVGKRKIDQEGRVFQEKWERAYFFVEVQNIPTCLICKQSMSVSKEYNLRRHYQTNHSKHYDQYMERMRDEKLHELKKRAQEVSLRLVRHRVSRAKTSVCKPKSNPEIPRAACRGPSWELMGEVT

SEQ ID NO: 3050 - protein, 327 aa, Homo sapiens [sequence omitted]

SEQ ID NO: 3051 - protein, 121 aa, Homo sapiens [sequence omitted]

SEQ ID NO: 3052 - protein, 273 aa, Homo sapiens
MQTRPCSWCARSPLSRPARLHARRVPGPQEGPRIQLRPNSKPAVGEHLSQTGSGDRAEQTDPTSAPRRPRALLPSSALGPPFPGHRAGSAAPGTRTGSGPAPPSAPLSPRTEAPITQAAPSRRRAVPGGLRPLPTPPRRPHGAPAPRAGCPSAALPPREPAEAVSGRVPASSGGPYSASAAESNATTTAPATAVPAPARVTIPGPNGIDLTSSASPDCPTARTQGHRAAFRIPSCPRAVAGNTAIGSVFRFPDRLRAAVGSGIPTRSITPGSR

SEQ ID NO: 3053 - protein, 406 aa, Homo sapiens [sequence omitted]

SEQ ID NO: 3054 - protein, 183 aa, Homo sapiens [sequence omitted]

SEQ ID NO: 3055 - protein, 134 aa, Homo sapiens
MGRHSPYSRHQVENGERSEAASSHVLAEGQQVQWYQQAAAQPVLFPGVCWWQLMHWVQHHPGGARLHHPGGARLHHPGGVRLHHPGLQDRVACVGRWGGGGGGAEKHNVQTGPAEEEDAGGWTCLCTRAPEPNR

SEQ ID NO: 3056 - protein, 303 aa, Homo sapiens [sequence omitted]

SEQ ID NO: 3057 - protein, 121 aa, Homo sapiens [sequence omitted]

SEQ ID NO: 3058 - protein, 152 aa, Homo sapiens
MDNLLIQVTGKKRVVLFSPRDAQYLYLKGTKSEVLNIDNPDLAKYPLFSKARRYECSLEAGDVLFIPALWFHNVISEEFGVGVNIFWKHLPSECYDKTDTYGNKDPTAASRAAQILDRALKTLAELPEEYRDFYARRMVLHIQDKAYSKNSE

SEQ ID NO: 3059 - protein, 234 aa, Homo sapiens
MELPNYSRQLLQQLYTLCKEQQFCDCTISIGTIYFRAHKLVLAAASLLFKTLLDNTDTISIDASVVSPEEFALLLEMMYTGKLPVGKHNFSKIISLADSLQMFDVAVSCKNLLTSLAATPGGPVKAETEEAAHSVSQEMSVNSPTAQESQRNAETPAETPTTAEACSPSPAVQTFSEAKKTSTEPGCERKHYQLNFLLENEGVFSDALMVTQDVLKKLEMCSNCCVPVEAVPIF

SEQ ID NO: 3060 - protein, 727 aa, Homo sapiens
MPKAEVNLGGLSSLVVNTPITSVSLSHSSSESSKMSESKDQENNCERPKESNVLHPNGECPVKSEPTEPGDEDEEDAYSNELDDEEVLGELTDSIGNKDFPLLNQSISPLSSSVLKFIEKGTSSSSATVSDDTEKKKQTAAVRASGSVASNYGISGKDFADASASKDSATAAHPSEIARGDEDSSATPHQHGFTPSTPGTPGPGGDGSPGSGIECPKCDTVLGSSRSLGGHMTMMHSRNSCKTLKCPKCNWHYKYQQTLEAHMKEKHPEPGGSCVYCKTGQPHPWLARGESYTCGYKPFRCEVCNYSTTTKGNLSIHMQSDKHLNNVQNLQNGNGEQVFGHSAPAPNTSLSGCGTPSPSKPKQKPTWRCEVCDYETNVARNLRIHMTSEKHMHNMMLLQQNMKQIQHNLHLGLAPAEAELYQYYLAQNIGLTGMKLENPADPQLMINPFQLDPATAAALAPGLVNNELPPEIRLASGQLMGDDLSLLTAGELSPYISDPALKLFQCAVCNKFTSDSLEALSVHVSSERSLPEEEWRAVIGDIYQCKLCNYNTQLKANFQLHCKTDKHMQKYQLVAHIKEGGKSNEWRLKCIAIGNPVHLKCNACDYYTNSVDKLRLHTTNHRHEAALKLYKHLQKQEGAVNPESCYYYCAVCDYTTKVKLNLVQHVRSVKHQQTEGLRKLQLHQQGLAPEEDNLSEIFFLLKIAHQMSLKLPHWEPGLVMMILQSSS

SEQ ID NO: 3061 - protein, 154 aa, Homo sapiens [sequence omitted]

SEQ ID NO: 3062 - protein, 145 aa, Homo sapiens
MSIFKIDYNHDCSSCHSVAAGFITISYLKVLQNTLKQFISGQWLVSNVRTSGEGEADGIPEERIEVVCSLVESPQIPSQTRKKVPECPETFLLRHILQRDWGFLCFKYRWGLTVLPRLGSSDPATWASQSDGITGMSHHARPWRF

SEQ ID NO: 3063 - protein, 840 aa, Homo sapiens
MGHFEKGQHALLNEGEENEMEIFGYRTQGCRKSLCLAGSIFSFGILPLVFYWRPAWHVWAHCVPCSLQEADTVLLRTTDEFQIYSWKKVIWIYLSALNSAFGLTPDHPLMTDEEYIINRAIRKPDLKVRCIKVQKIRYVWNYLEGQFQKIGSLEDWLSSAKIHQKFGSGLTREEQEIRRLICGPNTIDVEVTPIWKLLIKEVLNPFYIFQLFSVCLWFSEDYKEYAFAIIIMSIISISLTVYDLREQSVKLHHLVESHNSITVSVCGRKAGVQELESRVLVPGDLLILTGNKVLMPCDAVLIEGSCVVDEGMLTGESIPVTKTPLPKMDSSVPWKTQSEADYKRHVLFCGTEVIQAKAACSGTVRAVVLQTGFNTAKGDLVRSILYPKPVNFQLYRDAIRFLLCLVGTATIGMIYTLCVYVLSGEPPEEVVRKALDVITIAVPPALPAALTTGIIYAQRRLKKRGIFCISPQRINVCGQLNLVCFDKTGTLTRDGLDLWGVVSCDRNGFQEVHSFASGQALPWGPLCAAMASCHSLILLDGTIQGDPLDLKMFEATTWEMAFSGDDFHIKGVPAHAMVVKPCRTASQVPVEGIAILHQFPFSSALQRMTVIVQEMGGDRLAFMKGAPERVASFCQPETVPTSFVSELQIYTTQGFRVIALAYKKLENDHHATTLTRETVESDLIFLGLLILENRLKEETKPVLEELISARIRTVMITGDNLQTAITVARKSGMVSESQKVILIEANETTGSSSASISWTLVEEKKHIMYGNQDNYINIRDEVSDKGREGSYHFALTGKSFHVISQHFSSLLPKILINGTIFARMSPGQKSSLVEEFQKLE

SEQ ID NO: 3064 - protein, 357 aa, Homo sapiens
MSPELSMNGQAAGYELCGVLSRPSSKQNTPQYLASPLDQEVVPCTPSHVGRPRLEKLSGLAAPDYTRLSPAKIVLRRHLSQDHTVPGRPAASELHSRAEHTKENGLPYQSPSVPGSMKLSPQDPRPLSPGALQLAGEKSSEKGLRERAYGSSGELITSLPISIPLSTVQPNKLPVSIPLASVVLPSRAERARSTPSPVLQPRDPSSTLEKQIGANAHGAGSRSLALAPAGNAPPVPYPQDSAAAAALQAGGLGCWEWNRASWGDHGGCCPKPPRLITDTLSCIPRAGMRIGLSCSHLGLIPGSPDTDTSCLGVLIQPVRSAPVLSGAPVLTAGRPLTQDRLHTQQCPMAHDRGPPCW

SEQ ID NO: 3065 - protein, 148 aa, Homo sapiens [sequence omitted]

SEQ ID NO: 3066 - protein, 247 aa, Homo sapiens
MIRRCFQVAARLGHHRGLLEAPRILPRLNPASAFGSSTDSMFSRFLPEKTDLKDYALPNASWCSDMLSLYQEFLEKTKSSGWIKLPSFKSNRDHIRGLKLPSGLAVSSDKGDCRIFTRCIQVEGQGFEYVIFFQPTQKKSVCLFQPGSYLEGPPGFAHGGSLAAMMDETFSKTAFLAGEGLFTLSLNIRFKNLIPVDSLVVMDVEVDKIEDQKLYMSCIAHSRDQQTVYAKSSGVFLQLQLEEESPQ

SEQ ID NO: 3067 - protein, 308 aa, Homo sapiens
MHSRGREIVVLLNPWSINEAVSSYCTYFIKQDSKSFGIMVSWKGIYFILTLFWGSFFGSIFMLSPFLPLMFVNPSWYRWINNRLVATWLTLPVALLETMFGVKVIITGDAFVPGERSVIIMNHRTRMDWMFLWNCLMRYSYLRLEKICLKASLKGVPGFGWAMQAAAYIFIHRKWKDDKSHFEDMIDYFCDIHEPLQLLIFPEGTDLTENSKSRSNAFAEKNGLQKYEYVLHPRTTGFTFVVDRLREGRRQSEGSKGPLQGELQITAQGNQRGHKQMEKHSMLMDWKNQYREIGHTAQSNLQIQCYSH

SEQ ID NO: 3068 - protein, 129 aa, Homo sapiens
MARSWLTATSASWALKKKYITKRKQAARCLFYYLFLRWSLTCCPGWSAVAHICSLQPPPPGLKRLSCLSLPSSWDHRCAPPHPANCSLLNLRLPTQNFSCQVYDLKGEASKYLQLVSCLALELLVFGAF

SEQ ID NO: 3069 - protein, 621 aa, Homo sapiens
MGGAGALGGAGGVQGAAGRAAGGCPRALRPAARDPAREPAAANPAGRGPCGKELDSLRHQVDQLAEENVELELELQRSLEPPPGSPGEAPLAGAAPSLQDEVREAEAGRLRTLERENRELRGLLQVLQGQPGGQHPLLEAPREDPVLPVLEEAPQTPVAFDHSPQGLVQKARDGGPQALDLAPPALDSVLEASAECPQAPDSDPQEAESPLQAAAMDPQASDWSPQESGSPVETQESPEKAGRRSSLQSPASVAPPQGPGTKIQAPQLLGGETEGREAPQGELVPEAWGLRQEGPEHKPGPSEPSSVQLEEQEGPNQGLDLATGQAEAREHDQRLEGTVRDPAWQKPQQKSEGALEVQVWEGPIPGESLASGVAEQEALREEVAQLRRKAEALGDELEAQARKLEAQNTEAARLSKELAQARRAEAEAHREAEAQAWEQARLREAVEAAGQELESASQEREALVEALAAAGRERRQWEREGSRLRAQSEAAEERMQVLESEGRQHLEEAERERREKEALQAELEKAVVRGKELGARLEHLQRELEQAALERQEFLREKESQHQRYQGLEQRLEAELQAAATSKEEALMELKTRALQLEEELFQVMPARLGAGGHATLPSIP

SEQ ID NO: 3070 - protein, 653 aa, Homo sapiens
MECPVMETGSLFTSGIKRHLKDKRISKTTKLNVSLASKIKTKILNNSSIFKISLKHNNRALAQALSREKENSRRITTEKMLLQKEVEKLNFENTFLRLKLNNLNKKLIDIEALMNNNLITAIEMSSLSEFHQSSFLLSASKKKRISKQCKLMRLPFARVPLTSNDDEDEDKEKMQCDNNIKSKTLPDIPSSGSTTQPLSTQDNSEVLFLKENNQNVYGLDDSEHISSIVDVPPRESHSHSDQSSKTSLMSEMRNAQSIGRRWEKPSPSNVTERKKRGSSWESNNLSADTPCATVLDKQHISSPELNCNNEINGHTNETNTEMQRNKQDLPGLSSESAREPNAECMNQIEDNDDFQLQKTVYDADMDLTASEVSKIVTVSTGIKKKSNKKTNEHGMKTFRKVKDSSSEKKRERSKRQFKNSSDVDIGEKIENRTERSDVLDGKRGAEDPGFIFNNEQLAQMNEQLAQVNELKKMTLQTGFEQGDRENVLCNKKEKRITNEQEETYSLSQSSGKFHQESKFDKGQNSLTCNKSKASRQTFVIHKLEKDNLLPNQKDKVTIYENLDVTNEFHTANLSTKDNGNLCDYGTHNILDLKKYVTDIQPSEQNESNINKLRKKVNRKTEIISGMNHMYEDNDKDVVHGLKKGNFFFQNPRG

SEQ ID NO: 3071 - protein, 511 aa, Homo sapiens [sequence omitted]

SEQ ID NO: 3072 - protein, 132 aa, Homo sapiens [sequence omitted]

SEQ ID NO: 3073 - protein, 108 aa, Homo sapiens [sequence omitted]

SEQ ID NO: 3074 - protein, 410 aa, Homo sapiens
MGAQVRLPPGEPCREGYVLSLVCPNSSQAWCEITNVSQLLASPVLYTDLNYSINNLSISANVENKYSLYVGLVLAVSSSIFIGSSFILKKKGLLQLASKGFTRAGQGGHSYLKEWLWWVGLLSMGAGEAANFAAYAFAPATLVTPLGALSVLISAILSSYFLNEHLNIHGKIGCILSILGSTVMVIHAPQEEEVTSLHEMEMKLRDPGFISFAVIITVISLVLILIVAPKKGQTNILVYISICSLIGAFSVSSVKGLGIAIKELIEWKPVYKHPLVFVLLAVLVLSVTTQINYLNKALDTFNTSLVTPIYYVFFTSMVVTCSAILFQEWYGMTAGDIIGTLSGFFTIIIGIFLLHAFKNTDITWSELTSTAKKEAVSLNVNENNYVLLENLECSAPGYNDDVTLFSRTDD

SEQ ID NO: 3075 - protein, 199 aa, Homo sapiens
MCELPGSARSSPDRYSMEAVDMNTEDGFAFEEESDFNGNAHPSDTSELFEVKAQASRMQRLLGPSETSSLRNSQSENSSLNNMPLRGGLSVHTCSSASQSEASSMVNFPAYSVRSESSSAFQFSDIIDQLEQLSYPPTTAEDSSSTESDSWDSETEAPLDISLFFSNPFAHTSGERVPFDLQNNLKNLTPGEQIDKNPS

SEQ ID NO: 3076 - protein, 351 aa, Homo sapiens
MSRSRHLGKIRKRLEDVKSQWVRPARADFSDNESARLATDALLDGGSEAYWRVLSQEGEVDFLSSVEAQYIQAQAREPPCPPDTLGGAEAGPKGLDSSSLQSGTYFPVASEGSEPALLHSWASAEKPYLKEKSSATVYFQTVKHNNIRDLVRRCITRTSQVLVILMDVFTDVEIFCDILEAANKRGVFVCVLLDQGGVKLFQEMCDKVQISDSHLKNISIRSVEGEIYCAKSGRKFAGQIREKFIISDWRFVLSGSYSFTWLCGHVHRNILSKFTGQAVELFDEEFRHLYASSKPVMGLKSPRLVAPVPPGAAPANGRLSSSSGSASDRTSSNPFSGRSAGSHPVPESKQN

SEQ ID NO: 3077 - protein, 484 aa, Homo sapiens
MWYVSTRGVAPRVNFEGALFSGYAPDGGLFMPEELPQLDRETLCQWSTLSYPGLVKELCALFIGSELLPKDELNDLIDRAFSRFRHREVVHLSRLRNGLNVLELWHGVTYAFKDLSLSCTTQFLQYFLEKREKHVTVVVGTSGDTGSAAIESVQGAKNMDIIVLLPKGHCTKIQELQMTTVLKQNVHVFGVEGNSDELDEPIKTVFADVAFVKKHNLMSLNSINWSRVLVQMAHHFFAYFQCTPSLDTHPLPLVEVVVPTGAAGNLAAGYIAQKIGLPIRLVVAVNRNDIIHRTVQQGDFSLSEAVKSTLASAMDIQVPYNMERVFWLLSGSDSQVTRALMEQFERTQSVNLPKELHSKLSEAVTSVSVSDEAITQTMGRCWDENQYLLCPHSAVAVNYHYQQIDRQQPSTPRCCLAPASAAKFPEAVLAAGLTPETPAEIVALEHKETRCTLMRRGDNWMLMLRDTIEDLSRQWRSHALNTSQ

SEQ ID NO: 3078 - protein, 361 aa, Homo sapiens [sequence omitted]

SEQ ID NO: 3079 - protein, 945 aa, Homo sapiens [sequence omitted]

SEQ ID NO: 3080 - protein, 213 aa, Homo sapiens [sequence omitted]

SEQ ID NO: 3081 - protein, 895 aa, Homo sapiens [sequence omitted]

SEQ ID NO: 3082 - protein, 262 aa, Homo sapiens
MSRLSWGYREHNGPIHWKEFFPIADGDQQSPIEIKTKEVKYDSSLRPLSIKYDPSSAKIISNSGHSFNVDFDDTENKSVLRGGPLTGSYRLRQVHLHWGSADDHGSEHIVDGVSYAAELHVVHWNSDKYPSFVEAAHEPDGLAVLGVFLQIGEPNSQLQKITDTLDSIKEKGKQTRFTNFDLLSLLPPSWDYWTYPGSLTVPPLLESVTWIVLKQPINISSQQLAKFRSLLCTAEGEAAAFLVSNHRPPQPLKGRKVRASFH

SEQ ID NO: 3083 - protein, 169 aa, Homo sapiens [sequence omitted]

SEQ ID NO: 3084 - protein, 131 aa, Homo sapiens
MIFTFTFPFSLLFCLTCTVATEMHFRNRRFRPAPSAALVPVALDFPGPFPVGGPCRPHQGGVGVTWQKGPRSGDVVPRIWNLSHPSCSWTEFFPFILSEGPGFGVTAWRLVGGVFKWVTALSGSRGWPCPH

SEQ ID NO: 3085 - protein, 529 aa, Homo sapiens
MEQEKKLLVSDSNSFMERESLKSPFTGDTSMNNLETVHHNNSKADKLKEKPSEWSKRHRPQHYKHEDAKEMPLTWVQDEIWCHDSYESDGKSENWGNFIAKEEEKPNHQEWDSGEHTNACVQQNSSFVDRPYKCSECWKSFSNSSHLRTHQRTHSGEKPYKCSECAKCFCNSSHLIQHLRMHTGEKPYQCGECGKSFSNTSHLIIHERTHTGEKPYKCPECGKRFSSSSHLIQHHRSHTGEKPYECSVCGKGFSHSYVLIEHQRTHTGEKPYKCPDCGKSFSQSSSLIRHQRTHTGEKPYKCLECEKSFGCNSTLIKHQRIHTGEKPYQCPECGKNFSRSSNLITHQKMHTGEKSYESSEYEESLGQNCNVIEECRIQLGEKPYRCCECGKSFGLSSHLIRHQRTHTGEKPYRCSECWKTFSQSSTLVIHQRTHTGEKPYKCPDCGESFSQSFNLIRHRRTHIGEKPYKCTSCEKCFSRIAYLSQHRKIHVEKPFESPDVGDFPHEWTWKNCSGEMPFISSFSVSNSSS

SEQ ID NO: 3086 - protein, 944 aa, Homo sapiens
MASVKVAVRVRPMNRREEDLEAKFIIQMEKSKTTITNLKIPEGGTGDSGRERTKTFTYDFSFYSADTKSPDYVSQEMVFKTLGTDVVKSAFEGYNACVFAYGQTGSGKSYTMMGNSGDSGLIPRICEGLFSRINETTRWDEASFRTEVSYLEIYNERVRDLLRRKSSKTFNLRVREHPKEGPYVEDLSKHLVQNYGDVEELMDAGNINRTTAATGMNDVSSRSHAIFTIKFTQAKFDSEMPCETVSKIHLVDLAGSERADATGATGVRLKEGGNINKSLVTLGNVISALADLSQDAANTLAKKKQVFVPYRDSVLTWLLKDSLGGNSKTIMIATISPADVNYGETLSTLRYANRAKNIINKPTINEDANVKLIRELRAEIARLKTLLAQGNQIALLDSPTALSMEEKLQQNEARVQELTKEWTNKWNETQNILKEQTLALRKEGIGVVLDSELPHLIGIDDDLLSTGIILYHLKEGQTYVGRDDASTEQDIVLHGLDLESEHCIFENIGGTVTLIPLSGSQCSVNGVQIVEATHLNQGAVILLGRTNMFRFNHPKEAAKLREKRKSGLLSSFSLSMTDLSKSRENLSAVMLYNPGLEFERQQREELEKLESKRKLIEEMEEKQKSDKAELERMQQEVETQRKETEIVQLQIRKQEESLKRRSFHIENKLKDLLAEKEKFEEERLREQQEIELQKKRQEEETFLRVQEELQRLKELNNNEKAEKFQIFQELDQLQKEKDEQYAKLELEKKRLEEQEKEQVMLVAHLEEQLREKQEMIQLLRRGEVQWVEEEKRDLEGIRESLLRVKEARAGGDEDGEELEKAQLRFFEFKRRQLVKLVNLEKDLVQQKDILKKEVQEEQEILECLKCEHDKESRLLEKHDESVTDVTEVPQDFEKIKPVEYRLQYKERQLQYLLQNHLPTLLEEKQRAFEILDRGPLSLDNTLYQ

SEQ ID NO: 3087 - protein, 387 aa, Homo sapiens
MEKIEEQFANLHIVKCSLGTKEPTYLLGIDTSKTVQAGKENLVAVLCSNGSIRIYDKERLNVLREFSGYPGLLNGVRFANSCDSVYSACTDGTVKCWDARVAREKPVQLFKGYPSNIFISFDINCNDHIICAGTEKVDDDALLVFWDARMNSQNLSTTKDSLGAYSETHSDDVTQVRFHPSNPNMVVSGSSDGLVNVFDINIDNEEDALVTTCNSISSVSCIGWSGKGYKQIYCMTHDEGFYWWDLNHLDTDEPVTRLNIQDVREVVNMKEDALDYLIGGLYHEKTDTLHVIGGTNKGRIHLMNCSMSGLTHVTSLQGGHAATVRSFCWNVQDDSLLTGGEDAQLLLWKPGAIEKTFTKKESMKIASSVHQRVRVHSNDSYKRRKKQ

SEQ ID NO: 3088 - protein, 766 aa, Homo sapiens
MLAHLSRAAPCPLAAGAVAAVAVAVTRSLTAQSLRTARLGPATVPPSPLPAISSEPHDRAGKTLTDPTSHFIDRITEAWSHVGSHSKAKPEQRPSLHSRGMLDRSRLALCTLVFLCLSCNPLASLLGARGLPSPSDTTSVYHSPGRNVLGTESRDGPGWAQWLLPPVVWLLNGLLVLVSLVLLFVYGEPVTRPHSGPAVYFWRHRKQADLDLARGDFAQAAQQLWLALRALGRPLPTSHLDLACSLLWNLIRHLLQRLWVGRWLAGRAGGLQQDCALRVDASASARDAALVYHKLHQLHTMGKHTGGHLTATNLALSALNLAECAGDAVSVATLAEIYVAAALRVKTSLPRALHFLTRFFLSSARQACLAQSGSVPPAMQWLCHPVGHRFFVDGDWSVLSTPWESLYSLAGNPVDPLAQVTQLFREHLLERALNCVTQPNPSPGSADGDKEFSDALGYLQLLNSCSDAAGAPAYSFSISSSMATTTGVDPVAKWWASLTAVVIHWLRRDEEAAERLCPLVEHLPRVLQESERPLPRAALHSFKAARALLGCAKAESGPASLTICEKASGYLQDSLATTPASSSIDKAVQLFLCDLLLVVRTSLWRQQQPPAPAPAAQGTSSRPQASALELRGFQRDLSSLRRLAQSFRPAMRRVFLHEATARLMAGASPTRTHQLLDRSLRRRAGPGGKGGAVAELEPRPTRREHAEALLLASCYLPPGFLSAPGQRVGMLAEAARTLEKLGDRRLLHDCQQMLMRLGGGTTVTSS

SEQ ID NO: 3089 - protein, 178 aa, Homo sapiens
MTGWLSCSELLCTFQVPAQPKAGGSGSYWPARHSGARVILLVLYREHLNPNGHHFLTKEELLQRCAQKSPRVAPGSAPPWPALRSLLHRNLVLRTHQPARYSLTPEGLELAQKLAESEGLSLLNVGIGPKEPPGEETAVPGAASAELASEAGVQQQPLELRPGEYRVLLCVDIGETRG

SEQ ID NO: 3090 - protein, 128 aa, Homo sapiens
MSHPEQLLFAPGEQLTHSQGSQCLGDVTSLSLGEEFQPCVASEELVPMGNTQDSQDAKSQPKGDGALRLLVHACMYVCMCVQVCICVCVHVCERMCLLHAETSLLTADLCIQGGKNFHRSWRRWWLCD

SEQ ID NO: 3091 - protein, 151 aa, Homo sapiens
MLRWFVQQPTSCSHAQPLPPPHGTASLSPLVPSCGSAAWPSLHYLGSPADSGCSRGQRALPAVWPPSCYSQCPQGRPPHPVPRSPRRGSRDLGKEPGEEAAPWPSPCDSRLHRHPMPRTPLSASAGCDPSLIQPSPHPTPPQQGCVTPFHR

SEQ ID NO: 3092 - protein, 310 aa, Homo sapiens
MPRKDRVTWKPNYFLKIIQLLDDYLKCFIVGADNVNSKQMQQIRMSLCGKAVVLMGRNAMTRKAIRGHLENSPALEKLLPRIWDNVGFVFTKEDLTEIRDLLLANKVPAATRAGAITPCEVTVPAQNTGLDPEKTSFFQALGIITKISRGAIEILSDAQLIKTGDKVGASEATLLTMLNISPFSSGLVIQQVFDNGSIYNPEVLDITEETLYSRFLEGVRNVAGVCPQIHYPTVASVPHSIIDGYKRVLALSVETDDNFLLAEKVKAFLADPSAFVAAAPVAAATTAAPAAAAAAPAKDEAKEESEGGVR

SEQ ID NO: 3093 - protein, 933 aa, Homo sapiens
MPGVGVPLRYRTEFGAVVQDVVCFDAAPDATRRLYTSCKALLNVAQHTSLGSLIFCHHFGDIAAGLCQLGFCPTKRKLLTPAEEVLTEEERTLSRGALRDMLDQVYQPLAVRELLILQGGPPQSCTDVKTQMRCRAPAWLRRLCGQLLSERLMRPNGVQAVVRGILEGAGAGAAGGSDAEVTAADWKKCDLIAKILASCPQQSLSPENYYRDICPQVLDLFHFQDKLTARQFQRVATTTFITLSRERPHLAAKYLLQPVLAPLHRCLNTAELSESDMVPGTILVTEEELSRCIEDVFKVYVVGNEPLTVLMDSLLPVLGVLFLLYCFTKQSVSHIRSLCQEILLWILGKLERKKAIASLKGFAGLDKAVPSLHSLCQFRVATQGGIMITIKEAISDEDEDEALYQKVSSEQGRVEHLGDLLSHCQECGLAGDFFIFCLKELTHVASENETELKTEPFSSKSLLELEQHQTLLVEGQERKLLVLQLMAVLCERMSEQIFTNVTQVVDFVAATLQRACASLAHQAESTVESQTLSMSMGLVAVMLGGAVQLKSSDFAVLKQLLPLLEKVSNTYPDPVIQELAVDLRITISTHGAFATEAVSMAAQSTLNRKDLEGKIEEQQQTSHERPTDVAHSHLEQQQSHETAPQTGLQSNAPIIPQGVNEPSTTTSQKSGSVTTEQLQEVLLSAYDPQIPTRAAALRTLSHWIEQREAKALEMQEKLLKIFLENLEHEDTFVYLSAIQGVALLSDVYPEKILPDLLAQYDSSKDKHTPETRMKVGEVLMRIVRALGDMVSKYREPLIHTFLRGVRDPDGAHRASSLANLGELCQRLDFLLGSVVHEVTACLIAVAKTDGEVQVRRAAIHVVVLLLRGLSQKATEVLSAVLKDLYHLLKHVVCLEPDDVAKLHAQLALEELDDIMKNFLFPPQKLEKKIMVLP

SEQ ID NO: 3094 - protein, 123 aa, Homo sapiens [sequence omitted]

SEQ ID NO: 3095 - protein, 616 aa, Homo sapiens
MELRTPGTKWSPQGIGSLRRVVWDYSTPEISLFSEEGLKGEQVKLTEALKNSQGLEKPLQVASATVSAGLWLLYPKPLFEDTPYILEPGEYPTSEAWGTSDPSVGSLKPMRLGCPSVEKPGEPRAVVYEAPGFQGRSWEVSRDIYNLQQPEDSQSPHLASVGSLRVLGGCWVGYEKEGFRGHQYLLEEGEYPDWSHWGGYDELLTSLRVIRTDFGDPAVVLFEAMDFEGHGVEVSKALPDVELVQHGPSTQAIHVLSGVWVAYQEVGFSGEQYVLEKGVYRNCEDWGAGNSTLASLQPVLQVGEHDLHFVSKIQLFSRPDFLGDHFSFEDDQAALPASFRPQSCRVHGGSWILFDETNFEGDQHILSEGEFPTLTAMGCLASTVLGSLQKVSLHFSEPSIFLYGLECFEGKEIELSREVRSLQAEGFNNHVLSVRIKGGIWVLCEHSDFRGRQWLVGSCEITNWLTYSGTQRVGSLYPIKQRRVYFRLWNAALGGFLAVPDHVEDMKAGRVVVADPQAGGSCIWYYEDGLLKNQMAPTMSLQVIGPPSPGSKVVLWAESRLPRQTWSISESGHICSQMFEGQILDVKGGRGYDRDHVVLWEPDEDRASQIWTIHVL

SEQ ID NO: 3096 - protein, 187 aa, Homo sapiens
MSPLLPPPRARARAHTQTQTHTPTHTPCPLSPPCKLVAFSSQSLGCDLKEFRQQQSDPGGALDRQPHPRRLGPPSRDASGGLGKHFHPLLSSILAGCARNASSSLVFSFQDLNSNPIGSPDTAGGRVSWVLLGIWPALGALGALAQWKLVPEEHGGHANELLPESSRVPTGTRTPDHSPPHRPGPGF

SEQ ID NO: 3097 - protein, 1043 aa, Homo sapiens [sequence omitted]

SEQ ID NO: 3098 - protein, 120 aa, Homo sapiens [sequence omitted]

SEQ ID NO: 3099 - protein, 879 aa, Homo sapiens
MEKEETTRELLLPNWQGSGSHGLTIAQRDDGVFVQEVTQNSPAARTGVVKEGDQIVGATIYFDNLQSGEVTQLLNTMGHHTVGLKLHRKGDRSPEPGQTWTREVFSSCSSEVVLSGDDEEYQRIYTTKIKPRLKSEDGVEGDLGETQSCTITVTRRVTAYTVDVTGREGAKDIDISSPEFKIKIPRHELTEISNVDVETQSGKTVIRLPSGSGAASPTGSAVDIRAGAISASGPELQGAGHSKLQVTMPGIKVGGSGVNVNAKGLDLGGRGGVQVPAVDISSSLGGRAVEVQGPSLESGDHGKIKFPTMKVPKFGVSTGREGQTPKAGLRVSAPEVSVGHKGGKPGLTIQAPQLEVSVPSANIEGLEGKLKGPQITGPSLEGDLGLKGAKPQGHIGVDASAPQIGGSITGPSVEVQAPDIDVQGPGSKLNVPKMKVPKFSVSGAKGEETGIGVTLPTGEVTVPGVSGDVSLPEIATGGLEGKMKGTKVKTPEMIIQKPKISMQDVDLSLGSPKLKGDIKVSAPGVQGDVKGPQVALKGSRVDIETPNLEGTLTGPRLGSPSGKTGTCRISMSEVDLNVAAPKVKGGVDVTLPRVEGKVKVPEVDVRGPKVDVSAPDVEAHGPEWNLKMPKMKMPTFSTPGAKGEGPDVHMTLPKGDISISGPKVNVEAPDVNLEGLGGKLKGPDVKLPDMSVKTPKISMPDVDLHVKGTKVKGEYDVTVPKLEGELKGPKVDIDAPDVDVHGPDWHLKMPKMKMPKFSVPGFKAEGPEVDVNLPKADVDISGPKIDVTAPDVSIEEPEGKLKGPKFKMPEMNIKVPKISMPDVDLHLKGPNVKGEYDVTMPKVESEIKVPDVELKSAKMDIDVPDVEVQGPDWHLKMPK

SEQ ID NO: 3100 - protein, 147 aa, Homo sapiens [sequence omitted]

SEQ ID NO: 3101 - protein, 541 aa, Homo sapiens
MRLKMTTRNFPEREVPCDVEVERFTREVPCLSSLGDGWDCENQEGHLRQSALTLEKPGTQEAICEYPGFGEHLIASSDLPPSQRVLATNGFHAPDSNVSGLDCDPALPSYPKGYADKRTGDSDACGKGFNHSMEVIHGRNPVREKPYKYPESVKSFNHFTSLGHQKIMKRGKKSYEGKNFENIFTLSSSLNENQRNLPGEKQYRCTECGKCFKRNSSLVLHHRTHTGEKPYTCNECGKSFSKNYNLIVHQRIHTGEKPYECSKCGKAFSDGSALTQHQRIHTGEKPYECLECGKTFNRNSSLILHQRTHTGEKPYRCNECGKPFTDISHLTVHLRIHTGEKPYECSKCGKAFRDGSYLTQHERTHTGEKPFECAECGKSFNRNSHLIVHQKIHSGEKPYECKECGKTFIESAYLIRHQRIHTGEKPYGCNQCQKLFRNIAGLIRHQRTHTGEKPYECNQCGKAFRDSSCLTKHQRIHTKETPYQCPECGKSFKQNSHLAVHQRLHSREGPSRCPQCGKMFQKSSSLVRHQRAHLGEQPMET

SEQ ID NO: 3102 - protein, 101 aa, Homo sapiens
MMGNLGLMFLCGPHLKRLLFLFTLGFCALINVVLNLPLVRIPFYLGCLYFLLPTEKLHQVACPGDELGTGHLHMGPRAVHLQGPDNMSNEPSHIVVGDKGL

SEQ ID NO: 3103 - protein, 670 aa, Homo sapiens
MTKFQEMVTFKDVAVVFTREELGLLDLAQRKLYQDVMLENFRNLLSVGYQPFKLDVILQLGKEDKLRMMETEIQGDGCSGHKNQNEIDTLQEVRLRFLSYEDLICWQIWEQFTSKLTSNQDLIINLQGKRSKLLKQGDSPCQVWTGESSQVSEDENYVIKLQGESSNSIKNQELPLRTTWDFWRKMYLREPQNYQSRCQQIDVKNKLCKCDHCVRQRIAHQHDDHGVHKREKAFSHNNCGKDCVKESSQHSIIQSGEQTSDENGKGLSVGSNLELHQQLHLRDKPHVNVEYGKGIGYSSGLPRHQCFHIGEKCYRNGDSGEGFSQGSHLQPHQRVSTGENLYRCQVYARSSNQNSCLPSHELTHPGEKLCTCGRCGKGFHHSLDFDIHCVDSAGERACKCDVYDKGFSQTSQLQAHQRGHSRDKTYKWEVSDRIFNRNSGLHQRVHTGEKPYKCEVCDKGFSKASNLQAHQRIHTGEKPYKCDVCDKNFSRNSHLQAHQRVHTGEKPYKCDTCGKDFSQISHLQAHQRVHTGEKPYKCETCGKGFSQSSHLQDHQQVHTGENPYKCDVCGKGFSWSSHLQAHQRVHTGEKPYKCEECRKGFIWNSYLHVHQRIHTGEKPYKCGMCGKSFSQTSHLQAHQRVHTGEKPYKCFVCGKGFSKSSLSSDSSESP

SEQ ID NO: 3104 - protein, 147 aa, Homo sapiens
MLLSPGPGFLARWDSQAPPAQPREQEPQGRLGGCGGEWATCSWEAGRTRSPSQRSTHSITSHFHSWVAWGPPPCSELPLVVTWGPPWWARPLRLGSSLSEAPEVSSPPARRQRLHPGSHTPISALLPSILLHAASACYSSTFQGDAC

SEQ ID NO: 3105 - protein, 111 aa, Homo sapiens [sequence omitted]

SEQ ID NO: 3106 - protein, 103 aa, Homo sapiens [sequence omitted]

SEQ ID NO: 3107 - protein, 117 aa, Homo sapiens
MIPVQCGRSSLQGHLQQEGREFRQFRYRSVWETWPCGGRNTVQGHGSACLCYHIICLFLVGPKDLCPKLSPETSAFLFKLQLSFLTKNHVNPPGLWFVFLPLSIISFPPRSLLRFNT

SEQ ID NO: 3108 - protein, 713 aa, Homo sapiens
MCKFSPADWERLKGNQDKKPKSVTLEEAIAEQNESERCEYSVGNKHRDPFEAPEDKDLPVEKYFVERQPVSEPPADQVASDMPHSPTLRVDRKRKVSGDSSHTETTAEEVPEDPLLKAKRRRVSKDDWPEREMTNSSSNHLEDPHYSELTNLKVCIELTGLHPKKQRHLLHLRERWEQQVSAADGKPGRQSRKEVTQATQPEAIPQGTNITEEKPGRKRAEAKGNRSWSEESLKPSDNEQGLPVFSGSPPMKSLSSTSAGGKKQAQPSCAPASRPPAKQQKIKENQKTDVLCADEEEDCQAASLLQKYTDNSEKPSGKRLCKTKHLIPQESRRGLPLTGEYYVENADGKVTVRRFRKRPEPSSDYDLSPAKQEPKPFDRLQQLLPASQSTQLPCSSSPQETTQSRPMPPEARRLIVNKNAGETLLQRAARLGYEEVVLYCLENKICDVNHRDNAGYCALHEACARGWLNIVRHLLEYGADVNCSAQDGTRPLHDAVENDHLEIVRLLLSYGADPTLATYSGRTIMKMTHSELMEKFLTDYLNDLQGRNDDDASGTWDFYGSSVCEPDDESGYDVLANPPGPEDQDDDDDAYSDVFEFEFSETPLLPCYNIQVSVAQGPRNWLLLSDVLKKLKMSSRIFRCNFPNVEIVTIAEAEFYRQVSASLLFSCSKDLEAFNPESKELLDLVEFTNEIQTLLGSSVEWLHPSDLASDNYW

SEQ ID NO: 3109 - protein, 110 aa, Homo sapiens
MKGGPPRAQAPALPPRWRRRSRFSGNDAVCPRSRPAQPQMPEDLDRGHRDRVLPKVIKYHKGNGGRARSQNHRTWAKLKLLIKFRAHIVIDNILSGDGVLEQTTGLTKIY

SEQ ID NO: 3110 - protein, 368 aa, Homo sapiens [sequence omitted]

SEQ ID NO: 3111 - protein, 126 aa, Homo sapiens
MKTSQESLLRSRLSQLCVVMETGVSPATAEGPENLEDAPLLPGNSCPNERPLMQTELHQLVPEAEPEEMARQLLAVFGGYYIRLLVTSQLPQAMGTRHTNSPRIPCPCQLIEAYILGTGCCPFLAR

SEQ ID NO: 3112 - protein, 804 aa, Homo sapiens [sequence omitted]

SEQ ID NO: 3113 - protein, 159 aa, Homo sapiens
MIISVDAEKAFDKIQHLFMLKTLNKLGIGGTYLKIIRAIYDKPTANIILNGQKLEAFPLKTSTRQGCSLSPLLFNIVLELLARAIRQVREMKGIQIGREEVKLSLFADDIIVYFENPIISAPNLLKLIRTSAKSQVTKSMCKNHKHSYTSIIDEQRAKS

SEQ ID NO: 3114 - protein, 111 aa, Homo sapiens
MYIMEEDPSQPSQSPSSKCLSSSICSQIPWHSRQACPWEGPWDGEAGFAALHACPLGFQLTHPRVSGALQDGKCWGGGRQTTLCPTGTDPPCHRLPKGAPQPLPSPPWCCY

SEQ ID NO: 3115 - protein, 114 aa, Homo sapiens
MRSGVRDQPDQHGETHSLLKIQKLAGRGGARLHLKKKKNWGMGRCGLREVWVAVVFSKQCLLSGRAQWLMPVIPVLWETGWIMRSGVPDQPNQHGETASLLKIQKLAGCGGTRL

SEQ ID NO: 3116 - protein, 597 aa, Homo sapiens [sequence omitted]

SEQ ID NO: 3117 - protein, 109 aa, Homo sapiens [sequence omitted]

SEQ ID NO: 3118 - protein, 112 aa, Homo sapiens [sequence omitted]

SEQ ID NO: 3119 - protein, 527 aa, Homo sapiens
MDVVEVAGSWWAQEREDIIMKYEKGHRAGLPEDKGPKPFRSYNNNVDHLGIVHETELPPLTAREAKQIRREISRKSKWVDMLGDWEKYKSSRKLIDRAYKGMPMNIRGPMWSVLLNTEEMKLKNPGRYQIMKEKGKRSSEHIQRIDRDVSGTLRKHIFFRDRYGTKQRELLHILLAYEEYNPEVGYCRDLSHIAALFLLYLPEEDAFWALVQLLASERHSLQGFHSPNGGTVQGLQDQQEHVVATSQPKTMGHQISLGLTLRLWDVYLVEGEQALMPITRIAFKVQQKRLTKTSRCGPWARFCNRFVDTWARDEDTVLKHLRASMKKLTRKQGDLQPPAKPEQGSSASRPVPASRGGKTLCKGDRQAPPGPPARFPRPIWSASPPRAPRSSTPCPGGAVREDTYPVGTQGVPSPALAQGGPQGSWRFLQWNSMPRLPTDLDVEGPWFRHYDFRQSCWVRAISQEDQLAPCWQAEHPAERVRSAFAAPSTDSDQGTPFRARDEQPCAPTSGPCLCGLHLESSQFPPGF

SEQ ID NO: 3120 - protein, 456 aa, Homo sapiens [sequence omitted]

SEQ ID NO: 3121 - protein, 840 aa, Homo sapiens
MKKHVNEEVTEFLKFLQNSAKKCAQDYNMLSDDARLFTEKILRACIEQVKKYSEFYTLHEVTSLMGFFPFRVEMGLKLEKTLLALGSVKYVKTVFPSMPIKLQLSKDDIATIETSEQTAEAMHYDISKDPNAEKLVSRYHPQIALTSQSLFTLLNNHGPTYKEQWEIPVCIQVIPVAGSKPVKVIYINSPLPQKKMTMRERNQIFHEVPLKFMMSKNTSVPVSAVFMDKPEEFISEMDMSCEVNECRKIESLENLYLDFDDDVTELETFGVTTTKVSKSPSPASTSTVPNMTDAPTAPKAGTTTVAPSAPDISANSRSLSQILMEQLQKEKQLVTGMDGGPEECKNKDDQGFESCEKVSNSDKPLIQDSDLKTSDALQLENSQEIETSNKNDMTIDILHADGERPNVLENLDNSKEKTVGSEAAKTEDTVLCSSDTDEECLIIDTECKNNSDGKTAVVGSNLSSRPASPNSSSGQASVGNQTNTACSPEESCVLKKPIKRVYKKFDPVGEILKMQDELLKPISRKVPELPLMNLENSKQPSVSEQLSGPSDSSSWPKSGWPSAFQKPKGRLPYELQDYVEDTSEYLAPQEGNFVYKLFSLQDLLLLVRCSVQRIETRPRSKKRKKIRRQFPVYVLPKVEYQACYGVEALTESELCRLWTESLLHSNSSFYVGHIDAFTSKLFLLEEITSEELKEKLSALKISNLFNILQHILKKLSSLQEGSYLLSHAAEDSSLLIYKASDGKVTRTAYNLYKTHCGLPGVPSSLSVPWVPLDPSLLLPYHIHHGRIPCTFPPKSLDTTTQQKIGGTRMPTRSHRNPVSMETKSSCLPAQQVETEGVAPH

SEQ ID NO: 3122 - protein, 172 aa, Homo sapiens [sequence omitted]

SEQ ID NO: 3123 - protein, 1023 aa, Homo sapiens [sequence omitted]

SEQ ID NO: 3124 - protein, 381 aa, Homo sapiens [sequence omitted]

SEQ ID NO: 3125 - protein, 663 aa, Homo sapiens [sequence omitted]

SEQ ID NO: 3126 - protein, 695 aa, Homo sapiens
MKMKSQATMICCLVFFLSTECSHYRSKIHLKAGDKLQSPEGKPKTGRIQEKCEGPCISSSNCSQPCAKDFHGEIGFTCNQKKWQKSAETCTSLSVEKLFKDSTGASRLSVAAPSIPLHILDFRAPETIESVAQGIRKNCPFDYACITDMVKSSETTSGNIAFIVELLKNISTDLSDNVTREKMKSYSEVANHILDTAAISNWAFIPNKNASSDLLQSVNLFARQLHIHNNSENIVNELFIQTKGFHINHNTSEKSLNFSMSMNNTTEDILGMVQIPRQELRKLWPNASQAISIAFPTLGAILREAHLQNVSLPRQVNGLVLSVVLPERLQEIILTFEKINKTRNARAQCVGWHSKKRRWDEKACQMMLDIRNEVKCRCNYTSVVMSFSILMSSKSMTDKVLDYITCIGLSVSILSLVLCLIIEATVWSRVVVTEISYMRHVCIVNIAVSLLTANVWFIIGSHFNIKAQDYNMCVAVTFFSHFFYLSLFFWMLFKALLIIYGILVIFRRMMKSRMMVIGFAIGYGCPLIIAVTTVAITEPENGYMRPEACWLNWDNTKALLAFAIPAFVIVAVNLIVVLVVAVNTQRPSIGSSKSQDVVIIMRISKNVAILTPLLGLTWGFGIATLIEGTSLTFHIIFALLNAFQGFFILLFGTIMDHKIRDALRMRMSSLKGKSRAAENASLGPTNGSKLMNRQG

SEQ ID NO: 3127 - protein, 287 aa, Homo sapiens
MEENLANRSHAELETALRDSSRVLQAMLATQLRSFDDHFQHLLNDSERTLQATFPGAFGELYTQNARAFRDLYSELRLYYRGANLHLEETLAEFWARLLERLFKQLHPQLLLPDDYLDCLGKQAEALRPFGEAPRELRLRATRAFVAARSFVQGLGVASDVVRKVAQVPLGPECSRAVMKLVYCAHCLGVPGARPCPDYCRNVLKGCLANQADLDAEWRNLLGEPPPARAAWNCLGECTTGGPGGRVVPSLELGPRDLIRDALTRARSGWCCRVEGPGCLLNVLSDV

SEQ ID NO: 3128 - protein, 906 aa, Homo sapiens
MKSPLYLVSRSLPSSSQLKGSPQAISRASELHLLETPLVVKKAKSLAMSVTTSGFSEFTPQSILRSTLRSTPLASPSPSPGRSPQRLKETRISFVEEDVHPKWIPGAADDSKLEVFTTPKKCAVPVETEWLKSKDRTTSFFLNSPEKEHQEMDEGSQSLEKLDVSKGNSSVSITSDETTLEYQDAPSPEDLEETVFTASKPKSSSTALTTNVTEQTEKDGDKDVFASEVTPSDLQKQMGNLEDAETKDLLVAAEAFSELNHLSPVQGTEASLCAPSVYEGKIFTQKSKVPVLDEGLTSVETYTPAIRANDNKSMADVLGDGGNSSLTISEGPIVSERRLNQEVALNLKEDHEVEVGVLKESVDLPEEKLPISDSPPDTQEIHVIEQEKLEAQDSGEEARNLSFNELYPSGTLKLQYNFDTIDQQFCDLADNKDTAECDIAEVDGELFVAQSNFTLILEGEEGEVEPGDFASSDVLPKAANTATEEKLVCSGENDNHGQIANLPSAVTSDQKSQKVDTLPYVPEPIKVAIAENLLDVIKDTRSKEITSDTMEQSIHETIPLVSQNIMCPTKLVKSAFKTAQETSTMTMNVSQVDDVVSSKTRTRGQRIQNVNVKSAQQEASADVATPKMPGQSVRKKTRKAKEISEASENIYSDVRGLSQNQQIPQNSVTPRRGRRKKEVNQDILENTSSVEQELQITTGRESKRLKSSQLLEPAVEETTKKEVKVSSVTKRTPRRIKRSVENQESVEIINDLKVSTVTSPSRMIRKLRSTNLDASENTGNKQDDKSSDKQLRIKHVRRVRGREVSPSDVREDSNLESSQLTVQAEFDMSAIPRKRGRPGKINPSEDVGSKAVKEERSPKKKEAPSIRRRSTRNTPAKSENVDVGKPALGKSILVPNEELSMVMSSK

SEQ ID NO: 3129 - protein, 235 aa, Homo sapiens
MQQRGAAGSRGCALFPLLGVLFFQGVYIVFSLEIRADAHVRGYVGEKIKLKCTFKSTSDVTDKLTIDWTYRPPSSSHTVSIFHYQSFQYPTTAGTFRDRISWVGNVYKGDASISISNPTIKDNGTFSCAVKNPPDVHHNIPMTELTVTERGFGTMLSSVALLSILVFVPSAVVVALLLVRMGRKAAGLKKRSRSGYKKSSIEVSDDTDQEEEEACMARLCVRCAECLDSDYEETY

SEQ ID NO: 3130 - protein, 192 aa, Homo sapiens [sequence omitted]

SEQ ID NO: 3131 - protein, 120 aa, Homo sapiens
MLDKTPNHLFGPFQSLSQFFPIERINENSCLGCRWECPLPHPPPIPPLWGCILSCFFHHLLPSDSGWSHSLGLRPFNCQPTPPTVILTPQTHTYNCLCSISFVYSKERRPHYNVLNGGGL

SEQ ID NO: 3132 - protein, 136 aa, Homo sapiens
MPEAVTASSGYQRRTAHPRRLRALQSAGPFGPYIPGGPAPGRGGAGWAGRGWGRPNGFLGVVVRLRSPVVVRTKAKQGWKWLGFAHHSCPPLRPSFTDKAGIPVLLSMPLGLFWPLCIRWVTPAPNAAQDDKPWWP

SEQ ID NO: 3133 - protein, 147 aa, Homo sapiens
MDTSLSPHWFSSETRPWITSVICGIPRQRRRPRMACWREKPARTRPFEDPSLQGLALDKRHAVCSACFLEAGCPPHRGWCHIRAQTPSSLLERWAPSCPCCWKGLVGVNRLRSLCGHHACGLSHFVQRTAEAWQGHDVSVHRRPPWF

SEQ ID NO: 3134 - protein, 505 aa, Homo sapiens
MSAEEMVQIRLEDRCYPVSKRKLIEQSDYFRALYRSGMREALSQEAGGPEVQQLRGLSAPGLRLVLDFINAGGAREGWLLGPRGEKGGGVDEDEEMDEVSLLSELVEAASFLQVTSLLQLLLSQVRLNNCLEMYRLAQVYGLPDLQEACLRFMVVHFHEVLCKPQFHLLGSPPQAPGDVSLKQRLREARMTGTPVLVALGDFLGGPLAPHPYQGEPPSMLRYEEMTERWFPLANNLPPDLVNVRGYGSAILDNYLFIVGGYRITSQEISAAHSYNPSTNEWLQVASMNQKRSNFKLVAVNSKLYAIGGQAVSNVECYNPEQDAWNFVAPLPNPLAEFSACECKGKIYVIGGYTTRDRNMNILQYCPSSDMWTLFETCDVHIRKQQMVSVEETIYIVGGCLHELGPNRRSSQSEDMLTVQSYNTVTRQWLYLKENTSKSGLNLTCALHNDGIYIMSRDVTLSTSLEHRVFLKYNIFSDSWEAFRRFPAFGHNLLVSSLYLPNKAET

SEQ ID NO: 3135 - protein, 750 aa, Homo sapiens [sequence omitted]

SEQ ID NO: 3136 - protein, 157 aa, Homo sapiens [sequence omitted]

SEQ ID NO: 3137 - protein, 128 aa, Homo sapiens
MLLAPILAMLTILSCLKCFMTLCFLSVPFSSLAGSFQSPSGAVLPLPDPSQFFFRVPNPGSPLLSVNTIPLVELNLRIRSVFVTQIFNERLLRDGFFLISTGDKNMHDCCISGLIGKNAKCAWNHESI

SEQ ID NO: 3138 - protein, 136 aa, Homo sapiens
MVRGWPGSISHGCNLNCIQLLIVTHMSTGLTHFSSVSHSTTKEHHTQDSGESHRLEEPGAWPHLGLISSVGCRSCARSSWVLASCCMRRKWRAAPISSTVTMAGWVSSRRVTCEQSPGLRVIEVPNVRGLAGSYQG

SEQ ID NO: 3139 - protein, 470 aa, Homo sapiens [sequence omitted]

SEQ ID NO: 3140 - protein, 258 aa, Homo sapiens
MSMIRKRSHPSGSGAKKEKATQPETTEEVTDLKRQAVEEMMDRIKKGVHLRPVNQTARPKTKPESSKGCESAVDELKGILGTLNKSTSSRSLKSLDPENSETELERILRRRKVTAEADSSSPTGILATSESKSMPVLGSVSSVTKTALNKKTLEAEFNSPSPPTPEPGEGPRKLEGCTSSKVTFQPPSSIGCRKKYIDGEKQAEPVVVLDPVSTHEPQTKDQVAEKDPTQHKEDEGEIQPENKEDSIENVRETDSSNC

SEQ ID NO: 3141 - protein, 125 aa, Homo sapiens
MNSLEQAEDLKAFERRLTEYIHCLQPATGRWRMLLIVVSVCTATGAWNWLIDPETQKVSFFTSLWNHPFFTISCITLIGLFFAGIHKRVVAPSIIAARCRTVLAEYNMSCDDTGKLILKPRPHVQ

SEQ ID NO: 3142 - protein, 703 aa, Homo sapiens
MARARRAVVGSVRDVSTAATNLFYFTDFCIFLQPTHCFCCPEVSSSNYLSESFFMVKGAALFLQQGSSPQGQRSLQHPHKHAGDLPQHLQVMINLLRCEDRIKLAVRLESAWADRVRYMVVVYSSGRQDTEENILLGVDFSSKESKSCTIGMVLRLWSDTKIHLDGDGGFSVSTAGRMHIFKPVSVQAMWSALQVLHKACEVARRHNYFPGGVALIWATYYESCISSEQSCINEWNAMQDLESTRPDSPALFVDKPTEGERTERLIKAKLRSIMMSQDLENVTSKEIRNELEKQMNCNLKELKEFIDNEMLLILGQMDKPSLIFDHLYLGSEWNASNLEELQGSGVDYILNVTREIDNFFPGLFAYHNIRVYDEETTDLLAHWNEAYHFINKAKRNHSKCLVHCKMGVSRSASTVIAYAMKEFGWPLEKAYNYVKQKRSITRPNAGFMRQLSEYEGILDASKQRHNKLWRQQTDSSLQQPVDDPAGPGDFLPETPDGTPESQLPFLDDAAQPGLGPPLPCCFRRLSDPLLPSPEDETGSLVHLEDPEREALLEEAAPPAEVHRPARQPQQGSGLCEKDVKKKLEFGSPKGRSGSLLQVEETEREEGLGAGRWGQLPTQLDQNLLNSENLNNNSKRSCPNGMEVGRARPAGWHTPSLPSHSNWPTSASVVGTTGTRHHTQLIFFYCLLWAPSSHLQGPEGSFTG

SEQ ID NO: 3143 - protein, 100 aa, Homo sapiens
MTLQHFPFFFLFFFFSDMESHSIDQARVQWHNLSSLKPPPPWFKRSSCLSLQSSWDYRYAPPRLANFCIFSRDGVSPCWPGWSQTPQVIHMPLPPKVLGL

SEQ ID NO: 3144 - protein, 283 aa, Homo sapiens
MPGFFCDCWPSLEIRALLYAMGCIQSIGGKARVFREGITVIDVKASIDPVPTSIDESSSVVLRYRTPHFRASAQVVMPPIPKKETWVVGWIQACSHMEFYNQYGEQGMSSWELPDLQEGKIQAISDSDGVNYPWYGNTTETCTIVGPTKRDSKFIISMNDNFYPSVTWAVPVSESNVAKLTNIYRDQSFTTWLVATNTSTNDMIILQTLHWRMQLSIEVNPNRPLGQRARLREPIAQDQPKILSKNEPIPPSALVKPNANDAQVLMWRPKYGQPLVVIPPKHR

SEQ ID NO: 3145 - protein, 120 aa, Homo sapiens [sequence omitted]

SEQ ID NO: 3146 - protein, 113 aa, Homo sapiens [sequence omitted]

SEQ ID NO: 3147 - protein, 125 aa, Homo sapiens
MAHNLAVSLYSILLNNPDCTHSLSAVLRVAGSLQKSTEVMKAMQSLVKIPEIQATMRELSKEMMKAGIIEEMLEDTFESMDDQEEMEEEAEMEIDRILFEITAGMTVRSILSPLFLWPFFLHSLN

SEQ ID NO: 3148 - protein, 139 aa, Homo sapiens [sequence omitted]

SEQ ID NO: 3149 - protein, 305 aa, Homo sapiens [sequence omitted]

SEQ ID NO: 3150 - protein, 159 aa, Homo sapiens
MASTLATLEEPFSPLLHCGSPSLGWLRPEPAPSACGEMWREMRGWEPGLRTALAGQCEFQVSPGVSALGSEGLSTWANSCGGCTGSPNTASPPTSCLNSCRVSATFPPGRARDLQPTMPEPRTPPPPPPPPNGLLPGLSLPYGHRPLLCGTCSHQLPKG

SEQ ID NO: 3151 - protein, 124 aa, Homo sapiens
MSSLQLCCVSLLPNLSDCERTLCLSHGQPLAGPLICPPSIVWMAISCWASLTVKSLYCLLGFWWEAVISSNELPLPWICQEADGNLANSGRYQAPSSAPVTLFYTCGSTTVCSEGQSLPLLCFS

SEQ ID NO: 3152 - protein, 482 aa, Homo sapiens
MWTVPSFTNDSYQVYNVFSTNSFQLLTVKRTPHEAWRVPLTTKTNKTKGLPDCPKKPTNGPFIVTSILWDNCNAPKAVVLQTLAMGIVIDWAPKGHYWQDCSSKNTLCSEFIYSLDYIEHGWQSYTMRQRVSPYPFKWMDTGIAPPRPKIIHPFFTPEHPELWKLAAALSGIKIWNTTYQLLRTKTKTPTFNITLISEWVIPIRSCVKPPYMLLVGNIIMMPDAQTIECHNCKLFTCIDATFNPTTSILLVRAREGVWIPVSLHRPWESSPSIHIVNEVLKDILKRTKRFIFTLIAVLAGLLAVTATAATAGVAIRSSVQTAHYVEACQKNSSRLWNSQAQIDQKLANQINDLRQSVTWLGDRVMNLQHRMQLQCDWNTSDYCITPYAYNQDQHSWENVSRHLKAWDDNLTLDISQLKEQIFEASQAHLSTVPGSHIFEGITKQLPDFNPFKWLKPVRGSLLLLALLILVCLCCLLLVCRCL

SEQ ID NO: 3153 - protein, 145 aa, Homo sapiens [sequence omitted]

SEQ ID NO: 3154 - protein, 135 aa, Homo sapiens
MHFGTPTAYEKECFTYVLKGHIAVSAAVFPTGTKEPGYYEDGAFGIRIENVVLVVPVKTKYNFNNRGSLTFEPLTLVPIQTKMIDVDSLTDKECDWLNNYHLTCRDVIGKELQKQGRQEALEWLIRETQPISKQH

SEQ ID NO: 3155 - protein, 344 aa, Homo sapiens [sequence omitted]

SEQ ID NO: 3156 - protein, 187 aa, Homo sapiens [sequence omitted]

SEQ ID NO: 3157 - protein, 132 aa, Homo sapiens [sequence omitted]

SEQ ID NO: 3158 - protein, 238 aa, Homo sapiens
MLDHPEEYYSHYYHYYSRRLAPKVDVRVVILVSVCAISVFQFFSWWNSYNKAISYLATVPKYRIQATEIAKQQGLLKKAKEKGKNKKSKEEIRDEEENIIKNIIKSKIDIKGGYQKPQICDLLLFQIILAPFHLCSYIVWYCRWIYNFNIKGKEYGEEERLYIIRKSMKMSKSQFDSLEDHQKETFLKRELWIKENYEVYKQEQEEELKKKLANDPRWKRYRRWMKNEGPGRLTFVDD

SEQ ID NO: 3159 - protein, 399 aa, Homo sapiens
MLPDLPGPLVKKVSKTVETAVKRYYTFNTYPGCTDLNSPNFNFQANTDDGSCEGKMTNFSFGGVYQECTQLSGNRDVLLCQKLEQKNPLTGDFSCPSGYSPVHLLSQIHEEGYNHLECHRKCTLLVFCKTVCEDVFQVAKAEFRAFWCVASSQVPENSGLLFGGLFSSKSINPMTNAQSCPAGYFPLRLFENLKVCVSQDYELGSRFAVPFGGFFSCTVGNPLVDPAISRDLGAPSLKKCPGGFSQHPALISDGCQVSYCVKSGLFTGGSLPPARLPPFTRPPLMSQAATNTVIVTNSENARSWIKDSQTHQWRLGEPIELRRAMNVIHGDGGGLSGGAAAGVTVGVTTILAVVITLAIYGTRKFKKKAYQAIEERQSLVPGTAATGDTTYQEQGQSPA

SEQ ID NO: 3160 - protein, 151 aa, Homo sapiens
MTYDFHGAWRGTTGHHSPLFRGQEDASPDRFSNTICDFLRGATVHRILGQQVPYATKGNQWVGYDDQESVKSKVGFPKATPQDKEKEGGPAPSSQIPVPCTEVWAGLTEHMCPVHTLGQGTQPCSSGPPLPGAVPEGQAAGGRHGMGPGPG

SEQ ID NO: 3161 - protein, 1004 aa, Homo sapiens [sequence omitted]

SEQ ID NO: 3162 - protein, 211 aa, Homo sapiens
MGKCLRYITANTDTEEQSFPVPKAFNTRVEELNLDVLLQKVDHLRMSESGKSESFELLRDHKEKFRDEIEFMWRFARAYGDMYELSTNTQEKKHYANIGKTLSERAINRAPMNGHCHLWYAVLCGYVSEFEGLQNKINYGHLFKEHLDIAIKLLPEEPFLYYLKGRYCYTVSKLSWIEKKMAATLFGKIPSSTVQEALHNFLKVHFVYPLF

SEQ ID NO: 3163 - protein, 595 aa, Homo sapiens
MLENFQNLASLGYPLHTPHLISQWEQEEDLQTVKRELIQGIFMGEHREGFETQLKTNESVASQDICGEKISNEQKIVRFKRNDSWFSSLHENQESCGIDYQNKSHERHLRNHMVENIYECYEENQDGQTFSQVPNLDSLKRNTEVKSCECHECGKAFVDHSSLKSHIRSHTGSKPYQCKECGKAFHFLACFKKHMKTPTEEKPYECKECTKAFSCSSFFRAHMKIHIGKTNYECKECGKGFSCSSSLTEHKRIHSGDKPYECKECGKAFSCSSSLSKHKRIHSGDKPYECKECGKAFSSSSHLIIHIRIHTGEKPYECKECGKAFSESSKLTVHGRTHTGEKPYKCKECGKAYNCPSSLSIHMRKHTGEKPYECLECGKAFYLPTSLNTHVKNQSREKPYECKECGKAFSCPSSFRAHVRDHTGKIQYECKECGKTFSRSSSLTEHLRTHSGEKPYECKECGKAFISSSHLTVHIRTHTGEKPYECKKCGKAFIYPSALRIHMRTHTGEKPYECKECGKAFRHSSYLTVHARMHTGEKPFECLECGKAFSCPSSFRRHVRSHTGEKPYECKECGKAFVCPAYFRRHVKTHTRENI

SEQ ID NO: 3164 - protein, 177 aa, Homo sapiens
MGVSSVSLCPARQCPADTQARSLGSAALSAMAVSTRDTSIRARRPSDSKSGASVSAAPARLARSPVRSRSAQSPPVPCLPLAASSAQPVSWMERSLLRESSGSLMVGPAPPASVKMGYPSAGLCSAPQPPASTPPSPLVPAAPAVTAAPTTAKCMPMGRTSRMQTALAMPATVRMEL

SEQ ID NO: 3165 - protein, 216 aa, Homo sapiens
MLRQASYGTIKIGTYQSLKRLFIERPEDETLPINVICGILSGVISSTIANPTDVLKIRMQAQSNTIQGGMIGNFMNIYQQEGTRGLWKGVSLTAQRAAIVVGVELPVYDITKKHLILSGLMGDTVYTHFLSSFTCGLAGALASNPVDVVRTRMMNQRVLRDGRCSGYTGTLDCLLQTWKNEGFFALYKGFWPNWLRLGPWNIIFFVTYEQLKKLDL

SEQ ID NO: 3166 - protein, 312 aa, Homo sapiens
MEAGNQTGFLEFILLGLSEDPELQPFIFGLFLSMYLVTVLGNLLIILAISSDSHLHTPMYFFLSNLSWVDICFSTCIVPKMLVNIQTENKAISYMDCLTQVYFSMFFPILDTLLLTVMAYDRFVAVCHPLHYMIIMNPHLCGLLVFVTWLIGVMTSLLHISLMMHLIFCKDFEIPHFFCELTYILQLACSDTFLNSTLIYFMTGVLGVFPLLGIIFSYSRIASSIRKMSSSGGKQKALSTCGSHLSVVSLFYGTGIGVHFTSAVTHSSQKISVASVMYTVVTPMLNPFIYSLRNKDVKGALGSLLSRAASCL

SEQ ID NO: 3167 - protein, 141 aa, Homo sapiens [sequence omitted]

SEQ ID NO: 3168 - protein, 142 aa, Homo sapiens
MTRTKTVNLDNIKPQIIISKLLLTLFKSDWKTWTNQVHVLHLYVLCQYPRSSHMVDIHMEFQIQNRLPLPSCPYTSYSLFKSSICDFSFPESLKIQFENVYNTFSPVFSRLRLLLLKYTTFSLFWSRLTQYLCERELLTTLQ

SEQ ID NO: 3169 - protein, 118 aa, Homo sapiens
MATLDRKVPSPEAFLGKPWSSWIDAAKLHCSDNVDLEEAGKEGGKSREVMRLNKEDMHLFGHYPAHDDFYLVVCSACNQVVKPQVFQSHCGRKQDNRRNEGISRSGPESSQAIEKHQV

SEQ ID NO: 3170 - protein, 325 aa, Homo sapiens
MKRLGSVQRKMPCVFVTEVKEEPSSKREHQPFKVLATETVSHKALDADIYSAIPTEKVDGTCCYVTTYKDQPYLWARLDRKPNKQAEKRFKNFLHSKENPKEFFWNVEEDFKPAPECWIPAKETEQINGNPVPDENGHIPGWVPVEKNNKQYCWHSSVVNYEFEIALVLKHHPDDSGLLEISAVPLSDLLEQTLELIGTNINGNPYGLGSKKHPLHLLIPHGAFQIRNLPSLKHNDLLSWFEDCKEGKIEGIVWHCSDGCLIKVHRHHLGLCWPIPDTYMNSRPVIINMNLNKCDSAFDIKCLFNHFLKIDNQKFVRLKDIIFDV

SEQ ID NO: 3171 - protein, 374 aa, Homo sapiens
MRAPMLQKQQAPRMDTPPPEERLEKQNEKLNNQEEETEFKELDGLREALANLRGLSEEERSEKAMLRSRIEEQSQLICILKRRSDEALERCQILELLNAELEEKMMQEAEKLKAQGEYSRKLEERFMTLAANHELMLRFKDEYKSENIKLREENEKLRLENSSLFSQALKDEEAKVLQLTVRCEALTGELETLKERCAQDACQAQAREKELLELQSQQACTHTKETEQLRSQLQTLKQQHQQAVEQIAKAEETHSSLSQELQARLQTVTREKEELLQLSIERGKVLQNKQAEICQLEEKLEIANEDRKHALERFEQEAVAVDSNLRVRELQRKVDGIQKAYDELRLQSEAFKKHSLDLLSKERELNGKLRHLSP

SEQ ID NO: 3172 - protein, 111 aa, Homo sapiens [sequence omitted]

SEQ ID NO: 3173 - protein, 157 aa, Homo sapiens
MTEKLWRPMHLGAVPVYRGSPSVRDWMPNNHSVILIDDFESPQKLAEFIDFLDKNDEEYMKYLAYKQPGGITNQFLLDSLKHREWGVNDPLLPNYLNGFECFVCDYELARLDAEKAHAASPGDSPVFEPHIAQPSHMDCPVPTPGFGNVEEIPENDR

SEQ ID NO: 3174 - protein, 634 aa, Homo sapiens
MDPGSGGGGGGGGSSSGSSSSDSAPDCWDQADMEAPGPGPCGGGGSLAAAAEAQRENLSAAFSRQLNVNAKPFVPNVHAAEFVPSFLRCPAAPPPPAGGAANNHGAGSGAGGRAAPVESSQEEQSLCEGSNSAVSMELSEPIVENGETEMSPEESWEHKEEISEAEPGGGSLGDGRPPEESAHEMMEEEEEIPKPKSVVAPPGAPKKEHVNVVFIGHVDAGKSTIGGQIMYLTGMVDKRTLEKYEREAKEKNRETWYLSWALDTNQEERDKGKTVEVGRAYFETEKKHFTILDAPGHKSFVPNMIGGASQADLAVLVISARKGEFETGFEKGGQTKEHAMLAKTAGVKHLIVLINKMDDPTVNWSNERYEECKEKLVPFLKKVGFNPKKDIHFMPCSGLTGANLKEQSDFCPWYIGLPFIPYLDNLPNFNRSVDGPIRLPIVDKYKDMGTVVLGKLESGSICKGQQLVMMPNKHNVEVLGILSDDVETDTVAPGENLKIRLKGIEEEEILPGFILCDPNNLCHSGRTFDAQIVIIEHKSIICPGYNAVLHIHTCIEEVEITALICLVDKKSGEKSKTRPRFVKQDQVCIARLRTAGTICLETFKDFPQMGRFTLRDEGKTIAIGKVLKLVPEKD

SEQ ID NO: 3175 - protein, 219 aa, Homo sapiens
MAARSVDDISIKLLHEKGPATDHGVNVLPSTVPGREEGMTDRKHWFSFGTQPNVPGLQEPLDYRAANQAWQAVLAEVPRGGPGCAALRDLGRCGGPDVSTRRQWRPLPFSCPLSHTTQPPLGGHCRGSSAGRFHGRDQTSPGTVQQLPSAHVLKPGCTQHGDLSPGQASPPPAAALGPSPKAWTHTLGRPQLWAGLGSHRFGVPGPGTRNTLAACCVQE

SEQ ID NO: 3176 - protein, 302 aa, Homo sapiens
MSSLSGKVQTVLGLVEPSKLGRTLTHEHLAMTFDCCYCPPPPCQEAISKEPIVMKNLYWIQKNAYSHKENLQLNQETEAIKEELLYFKANGGGALVENTTTGISRDTQTLKRLAEETGVHIISGAGFYVDATHSSETRAMSVEQLTDVLMNEILHGADGTSIKCGIIGEIGCSWPLTESERKVLQATAHAQAQLGCPVIIHPGRSSRAPFQIIRILQEAGADISKTVMSHLDRVRLLVEEGCEDRILVAHDIHTKTRLMKYGGHGYSHILTNVVPKMLLRGITENVLDKILIENPKQWLTFK

SEQ ID NO: 3177 - protein, 146 aa, Homo sapiens [sequence omitted]

SEQ ID NO: 3178 - protein, 811 aa, Homo sapiens
MPALEHMNQILHILFVFLPFLWALGTLPPPDALLLWAMEQVLEFGLGGSSMSTHLRLLVMFIMSAGTAIASYFIPSTVGVVLFMTGFGFLLSLNLSDMGHKIGTKSKDLPSGPEKHFSWKECLFYIIILVLALLETSLLHHFAGFSQISKSNSQAIVGYGLMILLIILWILREIQSIYIIGIFRNPFYPKDVQTVTVFFEKQTRLMKIGIVRRILLTLVSPFAMIAFLSLDSSLQGLHSVSVCIGFTRAFRMVWQNTENALLETVIVSTVHLISSTDIWWNRSLDTGLRLLLVGIIRDRLIQFISKLQFAVTVLLTSWTEKKQRRKTTATLCILNIVFSPFVLVIIVFSTLLSSPLLPLFTLPVFLVGFPRPIQSWPGAAGTTACVCADTVYYYQMVPRLTAVLQTAMAAGSLGLLLPGSHYLGRFQDRLMWIMILECGYTYCSINIKGLELQETSCHTAEARRVDEVFEDAFEQEYTRVCSLNEHFGNVLTPCTVLPVKLYSDARNVLSGIIDSHENLKEFKGDLIKVLVWILVQYCSKRPGMKENVHNTENKGKAPLMLPALNTLPPPKSPEDIDSLNSETFNDWSDDNIFDDEPTIKKVIEEKHQLKDLPGTNLFIPGSVESQRVGDHSTGTVPENDLYKAVLLGYPAVDKGKQEDMPYIPLMEFSCSHSHLVCLPAEWRTSCMPSSKMKEMSSLFPEDWYQFVLRQLECYHSEEKASNVLEEIAKDKVLKDFYVHTVMTCYFSLFGIDNMAPSPGHILRVYGGVLPWSVALDWLTEKPELFQLALKAFRYTLKLMIDKASLGPIEDF

SEQ ID NO: 3179 - protein, 106 aa, Homo sapiens [sequence omitted]

SEQ ID NO: 3180 - protein, 373 aa, Homo sapiens
MKNIIGEKRTEVVNSLAPALFWCVHCRQWMSFRENPYSWRERIKKSLPTSDLKDKVQNLAALNILVLNEVIFTLLFWEVYRIPKKSQTEKENTTTERGRDAVGFRDQTPAPKTPNRSRERDPDKQTQNKEKRKRRSSLSPPSSAYERGTKRPDDRYDTPTSKKKVRIKDRNKLSTEERRKLFEQEVAQREAQKQQQQMQNLGMTSPLPYDSLGYNAPHHPFAGYPPGYPMQAYVDPSNPNAGKVLLPTPSMDPVQGQNYSVWDSNQQSVSVQSYAQPSLQYIQGQQIFTAHPQGVVVQPAAAVTTIVAPGQPQPLQPSEMVVTNNLLDLPPPSPPKPKTIVLPPNWKTARDPEGKIYYYHVITRDRVFLCCPD

SEQ ID NO: 3181 - protein, 584 aa, Homo sapiens [sequence omitted]

SEQ ID NO: 3182 - protein, 734 aa, Homo sapiens [sequence omitted]

SEQ ID NO: 3183 - protein, 342 aa, Homo sapiens [sequence omitted]

SEQ ID NO: 3184 - protein, 197 aa, Homo sapiens
MAAQIPIVATTSTPGIVRNSKKRPASPSHNGSSGGGYGASKKKKASASSFAQGISMEAMSENKMVPSEFSTGPVEKAAKPLPFKDPNFVHSGHGGAVAGKKNRTWKNLKQILASERALPWQLNDPNYFSIDAPPSFKPAKKYSDVSGLLEPPNCFPQRLHQLTFPLAMDEGSNFSRCSPTLVNFGFVFIMAILVGVK

SEQ ID NO: 3185 - protein, 603 aa, Homo sapiens
MPELYTEDFIQGCDVGELQEPGLPGVLSYVGAQERALDHRKPSTSSKKTKRVGMDQRCENRLECNGAISAHCNLRLPDSNDSPASASRVAGITDLSRNCVIKELAPQQEGNPGEVFHTVTLEQHEKHDIEEFCFREIKKKIHDFDCQWRDDERNCNKVTTAPKENLTCRRDQRDRRGIGNKSIKHQPGLSFLPHPHELQQFQAEGKIYECNRVEKSVNHGSSVSPPQILSSTVETHVSNKCGTDFICSSLLTQEQKSCIREKPYRYIECDKALNHGSHMTVRQVSHSGEKGYKCDLCGKVFSQKSNLARHWRVHTGEKPYKCNECDRSFSRNSCLALHRRVHTGEKPYKCYECDKVFSRNSCLALHQKTHIGEKPYTCKECGKAFSVRSTLTNHQVIHSGKKPYKCNECGKVFSQTSSLATHQRIHTGEKPYKCNECGKVFSQTSSLARHWRIHTGEKPYKCNECGKVFSYNSHLASHRRVHTGEKPYKCNECGKAFSVHSNLTTHQVIHTGEKPYKCNQCGKGFSVHSSLTTHQVIHTGEKPYKCNECGKSFSVRPNLTRHQIIHTGKKPYKCSDCGKSFSVRPNLFRHQIIHTKEKPYKRN

SEQ ID NO: 3186 - protein, 340 aa, Homo sapiens
MALRLLRRAARGAAAAALLRLKASLAADIPRLGYSSSSHHKYIPRRAVLYVPGNDEKKIKKIPSLNVDCAVLDCEDGVAANKKNEARLRIVKTLEDIDLGPTEKCVRVNSVSSGLAEEDLETLLQSRVLPSSLMLPKVESPEEIQWFADKFSFHLKGRKLEQPMNLIPFVETAMGLLNFKAVCEETLKVGPQVGLFLDAVVFGGEDFRASIGATSSKETLDILYARQKIVVIAKAFGLQAVDLVYIDFRDGAGLLRQSREGAAMGFTGKQVIHPNQIAVVQEQFSPSPEKIKWAEELIAAFKEHQQLGKGAFTFQGSMIDMPLLKQAQNTVTLATSIKEK

SEQ ID NO: 3187 - protein, 269 aa, Homo sapiens [sequence omitted]

SEQ ID NO: 3188 - protein, 120 aa, Homo sapiens
MMICRGFFCLFFKIIKAFLFKIALFYLGLYLIFMFLFFTVHIFLPFLFLSLPPTMHTRTHTHTHTSSKHIDLLKIKVTSGVGDKQAHTCWCGSLHELPPFPDTKAQLSGGKKIAVTSPIL

SEQ ID NO: 3189 - protein, 777 aa, Homo sapiens
MPQAQKKTTSVSLTIGSSSPKTGVTTAVIQPLSVPVQQVHSPTSYLCRPDGTTTAYFPPVFTKELQNTAVAEGQVVVLECRVRGAPPLQVQWFRQGSEIQDSPDFRILQKKPRSTAEPEEICTLVIAETFPEDAGIFTCSARNDYGSATSTAQLVVTSANTENCSYESMGESNNDHFQHFPPPPPILETSSLELASKKPSEIQQVNNPELGLSRAALQMQFNAAERETNGVHPSRGVNGLINGKANSNKSLPTPAVLLSPTKEPPPLLAKPKLGFPKKASRTARIASDEEIQGTKDAVIQDLERKLRFKEDLLNNGQPRLTYEERMARRLLGADSATVFNIQEPEEETANQEYKVSSCEQRLISEIEYRLERSPVDESGDEVQYGDVPVENGMAPFFEMKLKHYKIFEGMPVTFTCRVAGNPKPKIYWFKDGKQISPKSDHYTIQRDLDGTCSLHTTASTLDDDGNYTIMAANPQGRISCTGRLMVQAVNQRGRSPRSPSGHPHVRRPRSRSRDSGDENEPIQERFFRPHFLQAPGDLTVQEGKLCRMDCKVSGLPTPDLSWQLDGKPVRPDSAHKMLVRENGVHSLIIEPVTSRDAGIYTCIATNRAGQNSFSLELVVAAKEAHKPPVFIEKLQNTGVADGYPVRLECRVLGVPPPQIFWKKENESLTHSTDRVSMHQDNHGYICLLIQGATKEDAGWYTVSAKNEAGIVSCTARLDVYTQWHQQSQSTKPKKVRPSASRYAALSDQGLDIKAAFQPEANPSHLTLNTALVESEDL

SEQ ID NO: 3190 - protein, 117 aa, Homo sapiens [sequence omitted]

SEQ ID NO: 3191 - protein, 375 aa, Homo sapiens
MPLYSVTVKWGKEKFEGVELNTDEPPMVFKAQLFALTGVQPARQKVMVKGGTLKDDDWGNIKIKNMELPCGLTNLGNTCYMNATVQCIRSVPELKDALKRYAGALRASGEMASAQYITAALRDLFDSMDKTSSSIPPIILLQFLHMAFPQFAEKGEQGQYLQQDANECWIQMMRVLQQKLEAIEDDSVKETDSSSASAATPSKKKSLIDQFFGVEFETTMKCTESEEEEVTKGKENQLQLSCFINQEVKYLFTGLKLRLQEEITKQSPTLQRNALYIKSSKISRLPAYLTIQMVRFFYKEKESVNAKVLKDVKFPLMLDMYELCTPELQEKMVSFRSKFKDLEDKKVNQQPNTSDKKSSPQKEVKYEPFSFADGK

SEQ ID NO: 3192 - protein, 652 aa, Homo sapiens [sequence omitted]

SEQ ID NO: 3193 - protein, 104 aa, Homo sapiens [sequence omitted]

SEQ ID NO: 3194 - protein, 920 aa, Homo sapiens
MIAVSFKCRCQILRRLTKDESPYTKSASQTKPPDGALAVRRQSIPEEFKGSTVVELMKKEGTTLGLTVSGGIDKDGKPRVSNLRQGGIAARSDQLDVGDYIKAVNGINLAKFRHDEIISLLKNVGERVVLEVEYELPPVSVQGSSVIFRTVEVTLHKEGNTFGFVIRGGAHDDRNKSRPVVITCVRPGGPADREGTIKPGDRLLSVDGIRLLGTTHAEAMSILKQCGQEAALLIEYDVSVMDSVATASGPLLVEVAKTPGASLGVALTTSMCCNKLVIVIDKIKSASIADRCGALHVGDHILSIDGTSMEYCTLAEATQFLANTTDQVKLEILPHHQTRLALKGPDHAALVSSSFSPTSMSAYSLSSLNMGTLPRSLYSTSPRGTMMRRRLKKKDFKSSLSLASSTVGLAGQVVHTETTEVVLTADPVTGFGIQLQGSVFATETLSSPPLISYIEADSPAERCGVLQIGDRVMAINGIPTEDSTFEEASLLLRDSSITSKVTLEIEFDVAESVIPSSGTFHVKLPKKHNVELGITISSPSSRKPGDPLVISDIKKGSVAHRTGTLELGDKLLAIDNIRLDNCSMEDAVQILQQCEDLVKLKIRKDEDNSDEQESSGAIIYTVELKRYGGPLGITISGTEEPFDPIIISSLTKGGLAERTGAIHIGDRILAINSSSLKGKPLSEAIHLLQMAGETVTLKIKKQTDAQSASSPKKFPISSHLSDLGDVEEDSSPAQKPGKLSDMYPSTVPSVDSAVDSWDGSAIDTSYGTEGTSFQASGYNFNTYDWRSPKQRGSLSPVTKPRSQTYPDVGLSYEDWDRSTASGFAGAADSAETEQEENFWSQALEDLETCGQSGILRELEATIMSGSTMSLNHEAPTPRSQLGRQASFQERSSSRPHYSQTTRSNTLPSDVGRKSVTLRKM

SEQ ID NO: 3195 - protein, 224 aa, Homo sapiens [sequence omitted]

SEQ ID NO: 3196 - protein, 359 aa, Homo sapiens
MLENCRNLASLGNQVDKPRLISQLEQEDKVMTEERGILSGTCPDVENPFKAKGLTPKLHVFRKEQSRNMKMERNHLGATLNECNQCFKVFSTKSSLTRHRKIHTGERPYGCSECGKSYSSRSYLAVHKRIHNGEKPYECNDCGKTFSSRSYLTVHKRIHNGEKPYECSDCGKTFSNSSYLRPHLRIHTGEKPYKCNQCFREFRTQSIFTRHKRVHTGEGHYVCNQCGKAFGTRSSLSSHYSIHTGEYPYECHDCGRTFRRRSNLTQHIRTHTGEKPYTCNECGKSFTNSFSLTIHRRIHNGEKSYECSDCGKSFNVLSSVKKHMRTHTGKKPYECNYCGKSFTSNSYLSVHTRMHNRQM

SEQ ID NO: 3197 - protein, 327 aa, Homo sapiens
MTHLQAGLSPETLEKARLELNENPDTLHQDIQEVRDMVITRPDIGFLRTDDAFILRFLRARKFHHFEAFRLLAQYFEYRQQNLDMFKSFKATDPGIKQALKDGFPGGLANLDHYGRKILVLFAANWDQSRYTLVDILRAILLSLEAMIEDPELQVNGFVLIIDWSNFTFKQASKLTPSMLRLAIEGLQDSFPARFGGIHFVNQPWYIHALYTVIRPFLKEKTRKRIFLHGNNLNSLHQLIHPEILPSEFGGMLPPYDMGTWARTLLDHEYDDDSEYNVDSYSMPVKEVEKELSPKSMKRSQSVVDPTVLKRMDKNEEENMQPLLSLD

SEQ ID NO: 3198 - protein, 637 aa, Homo sapiens [sequence omitted]

SEQ ID NO: 3199 - protein, 201 aa, Homo sapiens
MSKIWKKKSVGANRGKENCKIGSNRCLIECLRHATLCKRFCCNCTQSCTCPCILMWHAEDLMDLPKDVGRASENKKAGAQMGIKHPQHSSRLRLRRPSPRLPSSQKPLNTHYFPSFSFCAHRHTHTHTHTHTHTHTHKCSLQPHTLKKLLSFSNFQSKDHSSGKPGPVYTPSSGLSLYRFYVVVRRAGPSVRLHYVLTVCP

SEQ ID NO: 3200 - protein, 237 aa, Homo sapiens
MGLTFINALVFGVQGNTLRALGHDSPLNQFLAGAAAGAIQCVICCPMELAKTRLQLQDAGPARTYKGSLDCLAQIYGHEGLRGVNRGMVSTLLRETPSFGVYFLTYDALTRALGCEPGDRLLVPKLLLAGGTSGIVSWLSTYPVDVVKSRLQADGLRGAPRYRGILDCVHQSYRAEGWRVFTRGLASTLLRAFPVNAATFATVTVVLTYARGEEAGPEGEAVPAAPAGPALAQPSSL

SEQ ID NO: 3201 - protein, 107 aa, Homo sapiens
MVSISRPRDPPASAFQSAGITGVSHCAPPLFFLFSQSLAVSPRMECSGAISAHCNLRLLGSSDSPASASRVAATTGVHHHTQLIFVFLVGTRVSSCWPGWSRTPDLR

SEQ ID NO: 3202 - protein, 88 aa, Homo sapiens
MALQADFDRAAEDVRKLKARPDDGELKELYGLYKQAIVGDINIACPGMLDLKGKAKWEAWNLKKGLSTEDATSAYISKAKELIEKYGI

SEQ ID NO: 3203 - protein, 112 aa, Homo sapiens [sequence omitted]

SEQ ID NO: 3204 - protein, 113 aa, Homo sapiens
MENSSFLFFYIYFLRQSLTLLPRLECNGAISAHCNLRLRGSSDSPASASGIAGTTGTCHHTQLTFCIFREDGVSSCWPSWSQTPDLSDPSASASQSYKIFFLWFLVNVFFEIA

SEQ ID NO: 3205 - protein, 126 aa, Homo sapiens [sequence omitted]

SEQ ID NO: 3206 - protein, 383 aa, Homo sapiens
MKQMTFEAQAFLEAVQFFRQEKGHYGSWEMITGDEIQLLEEAYTLVQHQVSEGLSALKEECRALTKGLEGTIRSDMDQIVNSKNYLIGKIKAMVAQPAEKSCLESVQPFLASILEELMGPVSSGFSEVRVLFEKEVNEVSQNFQTTKDSVQLKEHLDRLMNLPLHSVKMEPCYTKVNLLHERLQDLKSRFRFPHIDLVVQRTQNYMQELMENAVFTFEQLLSPHLQGEASKTAVAIEKVKLRVLKQYDYDSSTIRKKIFQEALVQITLPTVQKALASTCKPELQKYEQFIFADHTNMIHVENVYEEILHQILLDETLKVIKEAAILKKHNLFEDNMALPSESVSSLTDLKPPTGSNQASPARRASAILPGVLGSETLSNEVFL

SEQ ID NO: 3207 - protein, 153 aa, Homo sapiens
MPHPSPLHRLVFACSLFCFSLLLLRLGFPPASPLCACECPLSAHPLSLCPPVSLSSSVSPSHALPLSFSLFLRLSLSLIVLRHSSAWPSGDNMFHRQIIQQKRGGTCFSWLSPCLLLPLLEGKTGQGPCPAAENPSVFLWHCLVKAERGFRES

SEQ ID NO: 3208 - protein, 199 aa, Homo sapiens [sequence omitted]

SEQ ID NO: 3209 - protein, 141 aa, Homo sapiens [sequence omitted]

SEQ ID NO: 3210 - protein, 138 aa, Homo sapiens
MNAVLNLFTSTNSLHLQSCLGVPCSEDTRHTRSDVRKQAVKISLCDWVTQTLPDKEEPILSVPGDLDLVDILQNGIWIHYNDDIMLTGQDDKRLLYTRGLGKTHALQKKNLLLITRICRLQGGRGRNTTGCLSNTTLE

SEQ ID NO: 3211 - protein, 215 aa, Homo sapiens
MTARGTPSRFLASVLHNGLGRYVQQLQRLSFSVSRDGASSRGAREFVEREVIDFARRNPGVVIYVNSRPCCVPRVVAEYLNGAVREESIHCKSVEEISTLVQKLADQSGLDVIRIRKPFHTDNPSIQGQWHPFTNKPTTFRGLRPREVQDPAPAQDTGLRLSAVAPQILLPGWPDPPDLPTVDPISSSLTSAPAPMLSAVSCLPIVPALTTVCSA

SEQ ID NO: 3212 - protein, 105 aa, Homo sapiens
MYIGEFILERNPTHVENVAKPLDSLQIFMRIRKFILERNPTRVETVAKPLDSLQIFMHIRKFILEIKPYKCKECGKAFKSYYSILKHKRTHTRGMSYEGDECRGL

SEQ ID NO: 3213 - protein, 291 aa, Homo sapiens
MTGKTQTSNVTNKNDPKSINSRVFIGNLNTAIVKKVDIEAIFSKYGKIVGCSVHKGYAFVQYMSERHARAAVAGENARVIAGQPLDINMAGEPKPYRPKPGNKRPLSALYRLESKEPFLSVGGYVFDYDYYRDDFYNRLFDYHGRVPPPPRAVIPLKRPRVAVTTTRRGKGVFSMKGGSRSTASGSTGSKLKSDELQTIKKELTQIKTKIDSLLGRLEKIEKQQKAEAEAQKKQLEESLVLIQEECVSEIADHSTEEPAEGGPDADGEEMTDGIEEDFDEDGGHELFLQIK

SEQ ID NO: 3214 - protein, 387 aa, Homo sapiens
MVHCSCVLFRKYGNFIDKLRLFTRGGSGGMGYPRLGGEGGKGGDVWVVAQNRMTLKQLKDRYPRKRFVAGVGANSKISALKGSKGKDWEIPVPVGISVTDENGKIIGELNKENDRILVAQGGLGGKLLTNFLPLKGQKRIIHLDLKLIADVGLVGFPNAGKSSLLSCVSHAKPAIADYAFTTLKPELGKIMYSDFKQISVADLPGLIEGAHMNKGMGHKFLKHIERTRQLLFVVDISGFQLSSHTQYRTAFETIILLTKELELYKEELQTKPALLAVNKMDLPDAQDKFHELMSQLQNPKDFLHLFEKNMIPERTVEFQHIIPISAVTGEGIEELKNCIRKSLDEQANQENDALHKKQLLNLWISDTMSSTEPPSKHAVTTSKMDII

SEQ ID NO: 3215 - protein, 212 aa, Homo sapiens
MFGQNSTLVIHKAIHTGEKPYKSNECGKAFNQQSHLSRHHRLHTGEKPYKCNDCGKAFIHQSSLARHHRLHTGEKSYKCEECDRVFSQKSNLERHKIIHTGEKPYKCNECHKTFSHRSSLPCHRRLHSGEKPYKCNECGKTFNVQSHLSRHHRLHTGEKPYKCKVCDKAFMCHSYLANHTRIHSGEKPYKCNECGKAHNHLIDSSVKPCMSS

SEQ ID NO: 3216 - protein, 175 aa, Homo sapiens [sequence omitted]

SEQ ID NO: 3217 - protein, 157 aa, Homo sapiens
MLGSPPGPLQSVGEVPSLFPARLPAVPHFCLGRFGATRSPLPVPSFLCPWVPAWAQPLSSTTPKPWATSSWPAITEAACGCCVPSREKRMMSMPGPWPSPCSWPLLTCSSARTSRFRATGGALWTRQRTSTPWTAVNTSGRLVWASLTPPSLTTSTI

SEQ ID NO: 3218 - protein, 118 aa, Homo sapiens
MRTQGRTVGVAALHARFRASQRAGRHPVEAELGPAQRAVQQEQRARARAPGRVPGGRPRLLQQSRPPLPRRHGRQRPVVLRVRAVHPSLQVCHLGEGLPSGEGEDGAEGSQESAGETI

SEQ ID NO: 3219 - protein, 104 aa, Homo sapiens [sequence omitted]

SEQ ID NO: 3220 - protein, 109 aa, Homo sapiens
MPGKGLLFRPGTVTPVITSSGRMPGKGVTLQTWYSHPCDNFIWEGALERVALQTWYSHPCDNFIWEDALERVALQTWYSHPCDNFIWEDALETAHSSDLVQSPLLSLDP

SEQ ID NO: 3221 - protein, 702 aa, Homo sapiens [sequence omitted]

SEQ ID NO: 3222 - protein, 115 aa, Homo sapiens
MALIPSRVWLPFAVWVVDSAPVRGLVRREPFLRTGSFIALFYFPPLLPVLINLFSFFLTPSFWRQLGAIPVYASLLAEKTPFKTQRTLEGDALVGSVSIFLCAKDRQTEAERGCS

SEQ ID NO: 3223 - protein, 444 aa, Homo sapiens
MGPLQFRDVAIEFSLEEWHCLDAAQRNLYRDVMLENYRNLIFLGIVVSKPNLITCLEQGKKPLTMKRHEMIAKPPVMYSHFAQDLWSEQSIKDSFQKVILRRYEKCRHDNLQLKKGCESVDECPVHKRGYNGLKQCLATTQRKIFQCDEYVKFLHKFSNSNKHKIRDTGKKSFKCIEYGKTFNQSSTRTTYKKIDAGEKRYKCEECGKAYKQSSHLTTHKKIHTGEKPYKCEECGKAYKQSCNLTTHKIIHTGEKPYRCRECGKAFNHPATLFSHKKIHTGEKPYKCDKCGKAFISSSTLTKHEIIHTGEKPYKCEECGKAFNRSSNLTKHKRIHTGDVPYKCDECGKTFTWYSSLSKHKRAHTGEKPYKCEECGKAFTAFSTLTEHKIIHTGEKPYKCEECGKAFNWSSALNKHKKIHIRQKPCIVKNVENLLNVPQPLISIR

SEQ ID NO: 3224 - protein, 362 aa, Homo sapiens
MSTSETSKHRHCIHQILESVNHIHQHDIVHRDLKPENLLLASKCKGAAVKLADFGLAIEVQGEQQAWFGFAGTPGYLSPEVLRKDPYGKPVDIWACGVILYILLVGYPPFWDEDQHKLYQQIKAGAYDFPSPEWDTVTPEAKNLINQMLTINPAKRITADQALKHPWVCQRSTVASMMHRQETVECLRKFNARRKLKGAILTTMLVSRNFSVGRQSSAPASPAASAAGLAGQAAKSLLNKKSDGGVKPQSNNKNSLVSPAQEPAPLQTAMEPQTTVVHNATDGIKGSTESCNTTTEDEDLKAAPLRTGNGSSVPEGRSSRDRTAPSAGMQPQPSLCSSAITSVLEDAFVCCFSSHHLSLQSF

SEQ ID NO: 3225 - protein, 679 aa, Homo sapiens
MSPLKIHGPIRIRSMQTGITKWKEGSFEIVEKENKVSLVVHYNTGGIPRIFQLSHNIKNVVLRPSGAKQSRLMLTLQDNSFLSIDKVPSKDAEEMRLFLDAVHQNRLPAAMKPSQGSGSFGAILGSRTSQKETSRQLSYSDNQASAKRGSLETKDDIPFRKVLGNPGRGSIKTVAGSGIARTIPSLTSTSTPLRSGLLENRTEKRKRMISTGSELNEDYPKENDSSSNNKAMTDPSRKYLTSSREKQLSLKQSEENRTSGLLPLQSSSFYGSRAGSKEHSSGGTNLDRTNVSSQTPSAKRSLGFLPQPVPLSVKKLRCNQDYTGWNKPRVPLSSHQQQQLQGFSNLGNTCYMNAILQSLFSLQSFANDLLKQGIPWKKIPLNALIRRFAHLLVKKDICNSETKKDLLKKVKNAISATAERFSGYMQNDAHEFLSQCLDQLKEDMEKLNKTWKTEPVSGEENSPDISATRAYTCPVITNLEFEVQHSIICKACGEIIPKREQFNDLSIDLPRRKKPLPPRSIQDSLDLFFRAEELEYSCEKCGGKCALVRHKFNRLPRVLILHLKRYSFNVALSLNNKIGQQVIIPRYLTLSSHCTENTKPPFTLGWSAHMAISRPLKASQMVNSCITSPSTPSKKFTFKSKSSLALCLDSDSEDELKRSVALSQRLCEMLGNEQQQEDL

SEQ ID NO: 3226 - protein, 806 aa, Homo sapiens
MYFIISDLSKINNMYRFSLAAFLRLFQRALQNKQDSENTEQRIQSLISSLQHMVYEYICRCLFKADQLMFALHFVRGMHPELFQENEWDTFTGVVVGDMLRKADSQQKIRDQLPSWIDQERSWAVATLKIALPSLYQTLCFEDAALWRTYYNNSMCEQEFPSILAKKVSLFQQILVVQALRPDRLQSAMALFACKTLGLKEVSPLPLNLKRLYKETLEIEPILIIISPGADPSQELQELANAERSGECYHQVAMGQGQADLAIQMLKECARNGDWLCLKNLHLVVSWLPVLEKELNTLQPKDTFRLWLTAEVHPNFTPILLQSSLKITYESPPGLKKNLMRTYESWTPEQISKKDNTHRAHALFSLAWFHAACQERRNYIPQGWTKFYEFSLSDLRAGYNIIDRLFDGAKDVQWEFVHGLLENAIYGGRIDNYFDLRVLQSYLKQFFNSSVIDVFNQRNKKSIFPYSVSLPQSCSILDYRAVIEKIPEDDKPSFFGLPANIARSSQRMISSQVISQLRILGRSITAGSKFDREIWSNELSPVLNLWKKLNQNSNLIHQKVPPPNDRQGSPILSFIILEQFNAIRLVQSVHQSLAALSKVIRGTTLLSSEVQKLASALLNQKCPLAWQSKWEGPEDPLQYLRGLVARALAIQNWVDKAEKQALLSETLDLSELFHPDTFLNALRQETARAVGRSVDSLKFVASWKGRLQEAKLQIKISGLLLEGCSFDGNQLSENQLDSPSVSSVLPCFMGWIPQDACGPYSPDECISLPVYTSAERDRVVTNIDVPCGGNQDQWIQCGAALFLKNQ

SEQ ID NO: 3227 - protein, 828 aa, Homo sapiens
MSPVGDTLRTWCRNFPGMVNNTGIDWFMPWPPQALHAVAKSFLGYNPMIPAENIENVVKHVVLVHQSVDHYSQQFLQKLRRSNYVTPKNYLDFINTYSKLLDEKTQCNIAQCKRLDGGLDKLKEATIQLDELNQKLAEQKIVLAEKSAACEALLEEIAVNTAVAEEKKKLAEEKAMEIEEQNKVIAMEKAEAETTLAEVMPILEAAKLELQKLDKSDVTEIRSFAKPPKQVQTVCECILIMKGYKELNWKTAKGVMSDPNFLRSLMEIDFDSITQSQVKNIKGLLKTLNTTTEEMEAVSKAGLGMLKFVEAVMGYCDVFREIKPKREKVARLERNFYLTKRELERIQNELAAIQKELETLGAKYEAAILEKQKLQEEAEIMERRLIAADKLISGLGSENIRWLNDLDELMHRRVKLLGDCLLCAAFLSYEGAFTWEFRDEMVNRIWQNDILEREIPLSQPFRLESLLTDDVEISRWGSQGLPPDELSVQNGILTTRASRFPLCIDPQQQALNWIKRKEEKNNLRVASFNDPDFLKQLEMSIKYGTPFLFRDVDEYIDPVIDNVLEKNIKVSQGRQFIILGDKEVDYDSNFRLYLNTKLANPRYSPSVFGKAMVINYTVTLKGLEDQLLSVLVAYERRELEEQREHLIQETSENKNLLKDLEDSLLRELATSTGNMLDNVDLVHTLEETKSKATEVSEKLKLAEKTALDIDRLRDGYRPAARRGAILFFVLSEMALVNSMYQYSLIAFLEVFRLSLKKSLPDSILMKRLRNIMDTLTFSIYNHGCTGLFERHKLLFSFNMTIKIEQAEGRVPQEELDFFLKGNISLEKS

SEQ ID NO: 3228 - protein, 295 aa, Homo sapiens
MSRKQNQKDSSGFIFDLQSNTVLAQGGAFENMKEKINAVRAIVPNKSNNEIILVLQHFDNCVDKTVQAFMEGSASEVLKEWTVTGKKKNKKKKNKPKPAAEPSNGIPDSSKSVSIQEEQSAPSSEKGGMNGYHVNGAINDTESVDSLSEGLETLSIDARELEDPESAMLDTLDRTGSMLQNGVSDFETKSLTMHSIHNSQQPRNAAKSLSRPTTETQFSNMGMEDVPLATSKKLSSNIEKSVKDLQRRTVSLARYRVVVKEEMDASIKKMKQAFAELESWYSNAARVLGAKYCQV

SEQ ID NO: 3229 - protein, 141 aa, Homo sapiens
MISAHCSNLHFLGSSESPTLASQVGEITGTHHHTRLIFVFLVETGFHHVGHAGLELLTSSDPPTLASRSAGITGMSHRARPHGISRGEQVTLGLPLELLECVSWPLCGSPLRRAQIVSTPPSPLAALRVPVGAEGWGGTEQ

SEQ ID NO: 3230 - protein, 1057 aa, Homo sapiens
MEPLRSVASTSAKNDLDLNRSQTGKDCHLHRHFVDPVLNQLQRPPQETGERLNKYKEEHRRILQESIDVAPFTTKIKGLEGERENYSRVASSSSSPKSHIIKQDMDVERSVSDLYKMKHSVPQSLPQSNYFTTLSNSVVNEPPRSYPSKEVSNIYGDKQSNALAAAAANPQTLTSFITSLSKPPPLIKHQPESEVGKIPEHLPHQIASHSVTTFRNDCRSPTHLTVSSTNTLRSMPALHRAPVFHPPIHHSLERKEGSYSSLSPPTLTPVMPVNAGGKVQESQKPPTLIPEPKDSQANFKSSSEQSLTEMWRPNNNLSKEKTEWHVEKSSGKLQAAMASVIVRPSSSTKTDSMPAMQLASKDRVSERSSAGAHKTDCLKLAEAGETGRIILPNVNSDSVHTKSEKNFQAVSQGSVPSSVMSAVNTMCNTKTDVITSAADTTSVSSWGGSEVTSSLSNTILASTSSECVSSKSVSQPVAQKQECKVSTTAPVTLASSKTGSVVQPSSGFSGTTDFIHLKKHKAALAAAQYKSSNASETEPNAIKNQTLSASLPLDSTVICSTINKANSVGNGQASQTSQPNYHTKLKKAWLTRHSEEDKNTNKMENSGNSVSEIIKPCSVNLIASTSSDIQNSVDSKIIVDKYVKDDKVNRRKAKRTYESGSESGDSDESESKSEQRTKRQPKPTYKKKQNDLQKRKGEIEEDLKPNGVLSRSAKERSKLKLQSNSNTGIPRSVLKDWRKVKKLKQTGESFLQDDSCCEIWPNLQKCRECRLIRSKKGEEPAHSPVFCRFYYFRRLSFSKNGVVRIDGFSSPDQYDDEAMSLWTHENFEDDELDIETSKYILDIIGDKFCQLVTSEKTALSWVKKDAKIAWKRAVRGVREMCDACEATLFNIHWVCQKCGFVVCLDCYKAKERKSSRDKELYAWMKCVKGQPHDHKHLMPTQIIPGSVLTDLLDAMHTLREKYGIKSHCHCTNKQNLQVGNFPTMNGVSQVLQNVLNHSNKISLCMPESQQQNTPPKSEKNGGSSPESDVGTDNKLTPPESQSPLHWLADLAEQKARE

SEQ ID NO: 3231 - protein, 114 aa, Homo sapiens [sequence omitted]

SEQ ID NO: 3232 - protein, 144 aa, Homo sapiens
MPASAARPRPGPGQPYSLVWGSQRDAPSRAHTVGAGLAGFFLGILAASLTLILIGRRQQRRRQRELLARDKVGLDLGAPPSGTTSYSQDPPSPSPEDERLPLALAKRGSGFGGFSPPFLLDPCPSPAHIRLTGAPLATCDETSI

SEQ ID NO: 3233 - protein, 376 aa, Homo sapiens
MATAASNHYSLLTSSASIVHAEPPGGMQQGAGGYREAQSLVQGDYGALQSNGHPLSHAHQWITALSHGGDGSPWSTSPLGQPDIKPSVVVQQGGRGDELHGPGALQQQHQQQQQQQQQQQQQQQQQQQQQRPPHLVHHAANHHPGPGAWRSAAAAAHLPPSMGASNGGLLYSQPPPPPQGPPGHPGAHHDPHSDEDTPTSDDLEQFAKQFKQRRIKLGFTQADVGLALGTLYGNVFSQTTICRFEALQLSFKNMCKLKPLLNKWLEEADSSSGSPTSIDKIAAQGRKRKKRTSIEVSVKGALESHFLKCPKPSAQEITSLADSLQLEKEVVRVWFCNRRQKEKRMTPPGGTLPGAEDVYGGSRDTPPHHGVQTPVQ

SEQ ID NO: 3234 - protein, 190 aa, Homo sapiens
MSMTGTCPPPVLMSMMGTCPPPVLMSVMGTCPPPVLMSLDGNVSPTCPHVYDRNVSPTCPHVCDGNVSPTCPHVYDGNVSPTCPHVYDGNVSPTYPRVLPHLPLRSQSLEHPLWPPFPGTLCPLTLHLFLQAAPSACVCCIQSVYLLGVFPHRSHGGRGDQHPHPSHQMCQAHHRLSASTYLKSVRADDR

SEQ ID NO: 3235 - protein, 360 aa, Homo sapiens
MEERERGARSAGAGSPARPPSPRLDVSSDSFDPLLALYAPRLPPIPYPNAPCFNNVAEYESFLRTGVRGGGRGRGRARGAAAGSGVPAAPGPSGRTRRRPDAPAPDPERIQRLRRLMVAKEEGDGAAGAGRRGPGRSRKAPRNVLTRMPLHEGSPLGELHRCIREGVKVNVHIRTFKGLRGVCTGFLVAFDKFWNMALTDVDETYRKPVLGKAYERDSSLTLTRLFDRLKLQDSSKKEADSKSAVEDSTLSRYSQTSTWKLASVWGRADTGRGSHKRSRSVPSSLQASAREESRSELSGRTTRTDGSSVGGTFSRATTLSRGQSRKKKRKPKVDYQQVFTRHINQIFIRGENVLLVHLAQ

SEQ ID NO: 3236 - protein, 590 aa, Homo sapiens [sequence omitted]

SEQ ID NO: 3237 - protein, 1330 aa, Homo sapiens
MTTMLQKSDSNASFLRAARAGNLDKVVEYLKGGIDINTCNQNGLNALHLAAKEGHVGLVQELLGRGSSVDSATKKGNTALHIASLAGQAEVVKVLVKEGANINAQSQNGFTPLYMAAQENHIDVVKYLLENGANQSTATEDGFTPLAVALQQGHNQAVAILLENDTKGKVRLPALHIAARKDDTKSAALLLQNDHNADVQSKMMVNRTTESGFTPLHIAAHYGNVNVATLLLNRGAAVDFTARNGITPLHVASKRGNTNMVKLLLDRGGQIDAKTRDGLTPLHCAARSGHDQVVELLLERGAPLLARTKNGLSPLHMAAQGDHVECVKHLLQHKAPVDDVTLDYLTALHVAAHCGHYRVTKLLLDKRANPNARALNGFTPLHIACKKNRIKVMELLVKYGASIQAITESGLTPIHVAAFMGHLNIVLLLLQNGASPDVTNIRGETALHMAARAGQVEVVRCLLRNGALVDARAREEQTPLHIASRLGKTEIVQLLLQHMAHPDAATTNRYTPLHISAREGQVDVASVLLEAGAAHSLATKKGFTPLHVAAKYGSLDVAKLLLQRRAAADSAGKNGLTPLHVAAHYDNQKVALLLLEKGASPHATAKNGYTPLHIAAKKNQMQIASTLLNYGAETNIVTKQGVTPLHLASQEGHTDMVTLLLDKGANIHMSTKSGLTSLHLAAQEDKVNVADILTKHGADQDAHTKLGYTPLIVACHYGNVKMVNFLLKQGANVNAKTKNGYTPLHQAAQQGHTHIINVLLQHGAKPNATTANGNTALAIAKRLGYISVVDTLKVVTEEVTTTTTTITEKHKLNVPETMTEVLDVSDEEGDDTMTGDGGEYLRPEDLKELGDDSLPSSQFLDGMNYLRYSLEGGRSDSLRSFSSDRSHTLSHASYLRDSAVMDDSVVIPSHQVSTLAKEAERNSYRLSWGTENLDNVALSSSPIHSGFLVSFMVDARGGAMRGCRHNGLRIIIPPRKCTAPTRVTCRLVKRHRLATMPPMVEGEGLASRLIEVGPSGAQFLGKLHLPTAPPPLNEGESLVSRILQLGPPGTKFLGPVIVEIPHFAALRGKERELVVLRSENGDSWKEHFCDYTEDEQKGRSKLPIRVKGKEDVPKKTTHRPHPAASPSLKSERHAPGSPSPKTERHSTLSSSAKTERHPPVSPSSKTEKHSPVSPSAKTERHSPASSSSKTEKHSPVSPSTKTERHSPVSSTKTERHPPVSPSGKTDKRPPVSPSGRTEKHPPVSPGRTEKRLPVSPSGRTDKHQPVSTAGKTEKHLPVSPSGKTEKQPPVSPTSKTERIEETMSVRELMKAFQSGQDPSKHKTGLFEHKS

SEQ ID NO: 3238 - protein, 461 aa, Homo sapiens
MGAGPQHATLQAYPEAGTIEGLASLLVALLEKTTWVDRVHILQVLLRLLPNMSSDLQGQLQGLLVHLLNLDQPPSPQVCPLSCPQFSSPPTGPQQPHPHRLPQDQTQKKFVILALQLLLACSLESRDVVLELMSYFLYSPVHCRPELKKLLHGLGLQDPEGFLFKEMMTWVQGPDLDSKAGLRTCCHQKLEDMIQELQETPSQTSVVSGAPTRASVIPSGTSWSASGIFGRLSQVSEVPLMVVSPAEPHSLAPELQAQRMLAPTRSWGTPQLRLRVLSETLKSFCLEPEARLHPAGPAQLPGEPPPLEETDWSHSQLLDLGPIDALNFFCEQLRAQQRSSLQEKAAHPHPPVPYTVAPVPDMVVPPPREHWYHPILRLQEAKPQRSARSAMRLRSPMPSRLCAGRTLDGPIRTLKLPLPRVEPQPFPLDWPMPPRPLPPRLLQPALQRYFLPADADPDTYS

SEQ ID NO: 3239 - protein, 929 aa, Homo sapiens [sequence omitted]

SEQ ID NO: 3240 - protein, 641 aa, Homo sapiens
MDSVVFEDVAVNFTQEEWALLGPSQKKLYRDVMQETFVNLASIGENWEEKNIEDHKNQGRKLRSHMVERLCERKEGSQFGETISQTPNPKPNKKTFTRVKPYECSVCGKDYMCHSSLNRHMRSHTEHRSYEYHKYGEKSYECKECGKRFSFRSSFRIHERTHTGEKPYKCKQCGKAFSWPSSFQIHERTHTGEKPYECKECGKAFIYHTTFRGHMRMHTGEKPYKCKECGKTFSHPSSFRNHERTHSGEKPYECKQCGKAFRYYQTFQIHERTHTGEKPYQCKQCGKALSCPTSFRSHERIHTGEKPYKCKKCGKAFSFPSSFRKHERIHTGEKPYDCKECGKAFISLPSYRRHMIMHTGNGPYKCKECGKAFDCPSSFQIHERTHTGEKPYECKQCGKAFSCSSSFRMHERTHTGEKPHECKQCGKAFSCSSSVRIHERTHTGEKPYECKQCGKAFSCSSSFRMHERIHTGEKPYECKQCGKAFSFSSSFRMHERTHTGEKPYECKQCGKAFSCSSSFRMHERTHTGEKPYECKQCGKAFSCSSSIRIHERTHTGEKPYECKQCGKAFSCSSSVRMHERTHTGVKPYECKQCDKAFSCSRSFRIHERTHTGEKPYACQQCGKAFKCSRSFRIHERVHSGE

SEQ ID NO: 3241 - protein, 707 aa, Homo sapiens
MVVNVDNSVTAKVRKVATAPPAPAYKGFNPSETKIRTPDGKVWQEAEFQNMSRELYRDLALHFADDISIKEKPAEKSKEKKVVKPVRKVQKVAQLSSTECRTGSSHLISTSSWRDGQKLVKKILGPAPRMEPKEQRTASSDRGGRERTAKSGGHIGRAESDPRLDVLHRHLQRNSERSRSKSRSENNIRKLASSLPDNKQEENTALNKDFLPIEIRGILDDLQLDSTAHTAKQDTVELQNQKSSAPVHAPRSHSPVKRKPDKITANEDPPVISKRRHYDTDEVRQYIVRQQEERKRKQNEEKKAQKEATEQKNKRLQELYRKQKEAFTKVKNVPPSEPSAARRLQETYSKLLLEKTLLEEPSHQHVTQETQAKPGYQPSGESDKENKVQERPPSASSSSDMSLSEPPQPLARKDLMESTWMQPERLSPQVHHSQPQPFAGTAGSLLSHLLSLEHVGILHKDFESILPTRKNHNMASRPLTFTPQPYVTSPAAYTDALLKPSASQYKSKLDRIEALKATAASLSSRIESEAKKLAGASINYGSAWNTEYDVQQAPQEDGPWTKAVTPPVKDDNEDVFSARIQKMLGSCVSHATFDDDLPGVGNLSEFKKLPEMIRPQSAISSFRVRSPGPKPEGLLAQLCKRQTDSSSSDMQACSQDKAKISLGSSIDSVSEGPLLSEGSLSEEEGDQDGQPLLKVAEILKEKEFCPG

SEQ ID NO: 3242 - protein, 354 aa, Homo sapiens [sequence omitted]

SEQ ID NO: 3243 - protein, 151 aa, Homo sapiens
MCEALQCMCVLCRPKAGVCIGGGVGSGSAWSIMGGRSSFLTSKRFRHQQEQQPGCGTLRREGSQASRTDMAPGCANRGTACRLRAVGRTRLVLPTAGMEGARTAGGWPEECGPDSMAWCPHPPHPLAVRGAGENRKASSGEGKAFWKVGAG

SEQ ID NO: 3244 - protein, 531 aa, Homo sapiens
MNTGAWVNHGRGMVKEHNNHLIWTYDAPHLGYWIAAPLPGTRGSGINEDSKDITAYHTVFLTAILGGTIVIVIGFFAVLLCYCRDKCGTPQKRERNITKLEVLKRDQTTSTTHINHISTVKVALKAEDKSQLFNAKNSSYSPQKKEPSKAETEERVSMVKTRDDFKIYNEDVSFLSVNQNNYSRNPTQSLEPNVGSKQPKHINNNLSSSLGDAQDEKRYLTGNEEAYGRSHIPEQLMHIYSQPIAILQTSDLFSTPEQLHTAKSATLPRKGQLVYGQLMEPVNRENFTQTLPKMPIHSHAQPPDAREEDIILEGQQSLPSQASDWSRYSSSLLESVSVPGTLNEAVVMTPFSSELQGISEQTLLELSKGKPSPHPRAWFVSLDGKPVAQVRHSFIDLKKGKRTQSNDTSLDSGVDMNELHSSRKLEREKTFIKSMHQPKILYLEDLDLSSSESGTTVCSPEDPALRHILDGGSGVIMEHPGEESPGRKSTVEDFEANTSPTKRRGRPPLAKRDSKTNIWKKREERPLIPIN

SEQ ID NO: 3245 - protein, 344 aa, Homo sapiens
MDLEWRQGSGARMILQDEDITTKIENDWKRLNTLAHYQVPDGSVVALVSKQVTAYNAVNNSTVSRTSASKYENMIRYTGSPDSLRSRTPMITPDLESGVKMWHLVKNHEHGDQKEGDRGSKMVSEIYLTRLLATKGTLQKFVDDLFETIFSTAHRGSALPLAIKYMFDFLDEQADKHGIHDPHVRHTWKSNCLPLRFWVNMIKNPQFVFDIHKNSITDACLSVVAQTFMDSCSTSEHRLGKDSPSNKLLYAKDIPSYKNWVERYYSDIGKMPAISDQDMNAYLAEQSRMHMNEFNTMSALSEIFSYVGKYSEEILGPLDHDDQCGKQKLAYKLEQVITLMSLDS

SEQ ID NO: 3246 - protein, 158 aa, Homo sapiens
MSVKNVGNHLGTSHTSLNTREFTLEKGHMSVENVGNVFIKRAVSFNISRSTLEKGHMSVENVGNVFVKRAVSFDISRFTLEKGHMSVENVESVFVKRETSLNINEFTREKDIMNVENLADLLVKRAPSFNIREITLESTYEYGECAKSSSQKVGLIQQ

SEQ ID NO: 3247 - protein, 223 aa, Homo sapiens
MALSVPLLYSLVRAISEAGAPPGSAGPLLLQPQRHRAAGCFLGTCLDLLDSFTLVELMLEGRVPLPAHLRYLLIAVYFLTLASPVLWLYELNAAAAAAASWGQASGPGSCSRLLRLLGGCLVDVPLLALRCLLVVSYQQPLSIFMLKNLFFLGCRGLEALEGCWDRGNRASPSRARGGYGAPPSAPPPPPPPPQGGSQLGHCISENEGGAHGYVNTLAVASQN

SEQ ID NO: 3248 - protein, 370 aa, Homo sapiens
MLAPGSSPGQRGRLALQWRQVSWITCWIALYAVEALPTCPFSCKCDSRSLEVDCSGLGLTTVPPDVPAATRTLLLLNNKLSALPSWAFANLSSLQRLDLSNNFLDRLPRSIFGDLTNLTELQLRNNSIRTLDRDLLRHSPLLRHLDLSINGLAQLPPGLFDGLLALRSLSLRSNRLQNLDRLTFEPLANLQLLQVGDNPWECDCNLREFKHWMEWFSYRGGRLDQLACTLPKELRGKDMRMVPMEMFNYCSQLEDENSSAGLDIPGPPCTKASPEPAKPKPGAEPEPEPSTACPQKQRHRPASVRRAMGTVIIAGVVCGVVCIMMVVAAAYGCIYASLMAKYHRELKKRQPLMGDPEGEHEDQKQISSVA

SEQ ID NO: 3249 - protein, 160 aa, Homo sapiens
MLALRLLNVVAPAYFLCISLVTFVLQLFLFLPSMREDPAAARLFSPALLHGALFLFLSANALGNYVLVIQNSPDDLGACQGASARKTPCPSPSTHFCRVCARVTLRHDHHCFFTGNCIGSRNMRNFVLFCLYTSLAQELTRGLRKEVAAGPAGPHVQCRK

SEQ ID NO: 3250 - protein, 176 aa, Homo sapiens
MTRRGVCVCVHVCICVLVCSHSIPLCACVLAAWDSAVFWEGGGELSHVLYYIFFEMGSCSVAQAGVQWCDLSSLQLLPPGSSSSPASACQIAGITGVYHHSQLIFVFLVEMGFYHVGQAGLELLASGDPPALASQSAEITGVNYRAWPHVLYFFQVILKSTTRNVGMGFGMYNGNR

SEQ ID NO: 3251 - protein, 238 aa, Homo sapiens
MIHTGEKPYKCEECGKAFNRSSHLTTHKRIHTGHKPYKCKECGKSFSVFSTLTKHKIIHTDKKPYKCEECGKAFNRSSILSIHKKIHTGEKPYKCEECGKAFKRSSHLAGHKQIHSVQKPYKCEECGKAFSIFSTLTKHKIIHTEEKPYKCEKCGKTFYRFSNLNTHKIIHTGEKPCKCEECGKAFNHSSNLIKHKLIHTGDKPYKCEACGKAFRRSSHLSRHKIIHIGIHTEETVQK

SEQ ID NO: 3252 - protein, 119 aa, Homo sapiens [sequence omitted]

SEQ ID NO: 3253 - protein, 117 aa, Homo sapiens [sequence omitted]

SEQ ID NO: 3254 - protein, 386 aa, Homo sapiens
MAGYEYVSPEQLAGFDKYKYSAVDTNPLSLYVMHPFWNTIVKVFPTWLAPNLITFSGFLLVVFNFLLMAYFDPDFYASAPGHKHVPDWVWIVVGILNFVAYTLDGVDGKQARRTNSSTPLGELFDHGLDSWSCVYFVVTVYSIFGRGSTGVSVFVLYLLLWVVLFSFILSHWEKYNTGILFLPWGYDISQVTISFVYIVTAVVGVEAWYEPFLFNFLYRDLFTAMIIGCALCVTLPMSLLNFFRSYKNNTLKLNSVYEAMVPLFSPCLLFILSTAWILWSPSDILELHPRVFYFMVGTAFANSTCQLIVCQMSSTRCPTLNWLLVPLFLVVLVVNLGVASYVESILLYTLTTAFTLAHIHYGVRVVKQLSSHFQIYPFSLRKPNSD

SEQ ID NO: 3255 - protein, 161 aa, Homo sapiens
MNGGPQKRCKVEHRSRGGREASALGLVPRLLRGLWVIRKVLEESEWGNISMRRERVRCGQAVSSASLRVSLGPVKGDCVLEVMLHLLSSAQHSGETASSQRPLTAPSTKTTGPSQAQSSLTCMENVMPFSQSFPLAFCSSVTSMIICSWFHSFSPPDGPVP

SEQ ID NO: 3256 - protein, 177 aa, Homo sapiens
MELGREDGERRKEGETMNGGPQKRCKVEHRSRGGREASALGLVPRLLRGLWVIRKVLEESEWGNISMRRERVRCGQAVSSASLRVSLGPVKGDCVLEVMLHLLSSAQHSGETASSQRPLTAPSTKTTGPSQAQSSLTCMENVMPFSQSFPLAFCSSVTSMIICSWFHSFSPPDGPVP

SEQ ID NO: 3257 - protein, 505 aa, Homo sapiens
MMESHRVSVLSCTKDRTWNGTKPVCKALMCKPPPLIPNGKVVGSDFMWGSSVTYACLEGYQLSLPAVFTCEGNGSWTGELPQCFPVFCGDPGVPSRGRREDRGFSYRSSVSFSCHPPLVLVGSPRRFCQSDGTWSGTQPSCIDPTLTTCADPGVPQFGIQNNSQGYQVGSTVLFRCQKGYLLQGSTTRTCLPNLTWSGTPPDCVPHHCRQPETPTHANVGALDLPSMGYTLIYSCQEGFSLKGGSEHRTCKADGSWTGKPPICLEVRPSGRPINTAREPPLTQALIPGDVFAKNSLWKGAYEYQGKKQPAMLRVTGFQVANSKVNATMIDHSGVELHLAGTYKKEDFHLLLQVYQITGPVEIFMNKFKDDHWALDGHVSSESSGATFIYQGSVKGQGFGQFGFQRLDLRLLESDPESIGRHFASNSSSVAAAILVPFIALIIAGFVLYLYKHRRRPKVPFNGYAGHENTNVRATFENPMYDRNIQPTDIMASEAEFTVSTVCTAV

SEQ ID NO: 3258 - protein, 725 aa, Homo sapiens
MEVEGPEDQMVFSEQAANKDVNGQESTPGIVPDAVQVHTEEQQKSHPSESLDTDSLLIAVSSQHTVNTELEKQISNEVDSEDLKMSSEVKHICGEDQIEDKMEVTENIEVVTHQITVQQEQLQLLEEPETVVSREESRPPKLVMESVTLPLETLVSPHEESISLCPEEQLVIERLQGEKEQKENSELSTGLMDSEMTPTIEGCVKDVSYQGGKSIKLSSETESSFSSSADISKADVSSSPTPSSDLPSHDMLHNYPSALSSSAGNIMPTTYISVTPKIGMGKPAITKRKFSPGRPRSKQGAWSTHNTVSPPSWSPDISEGREIFKPRQLPGSAIWSIKVGRGSGFPGKRRPRGAGLSGRGGRGRSKLKSGIGAVVLPGVSTADISSNKDDEENSMHNTVVLFSSSDKFTLNQDMCVVCGSFGQGAEGRLLACSQCGQCYHPYCVSIKITKVVLSKGWRCLECTVCEACGKATDPGRLLLCDDCDISYHTYCLDPPLQTVPKGGWKCKWCVWCRHCGATSAGLRCEWQNNYTQCAPCASLSSCPVCYRNYREEDLILQCRQCDRWMHAVCQNLNTEEEVENVADIGFDCGMCRPYMPASNVPSSDCCESSLVAQIVTKVKELDPPKTYTQDGVCLTESGMTQLQSLTVTVPRRKRSKPKLKLKIINQNSVAVLQTPPDIQSEHSRDGEMDDSREGELMDCDGKSESSPEREAVDDETKGVEGTDGV

SEQ ID NO: 3259 - protein, 139 aa, Homo sapiens [sequence omitted]

SEQ ID NO: 3260 - protein, 134 aa, Homo sapiens
MWVYVCCVCMCRWCLCVCIYMCVCVPVCMCVYVCVYVRICVICVCVCVFVCAHMCSCVFVYVCICVCLYVCVFVCVCMYVYLCVFVCMCLCVCICVCVCVCVCVSSHLVLTMTCRGSSVINPTLLSTRPRPCQR

SEQ ID NO: 3261 - protein, 839 aa, Homo sapiens
MSAGDGLRRGKSARCGLTFSVGRFFRWMVDTRISVRIHEYAAISLTACMENLVEEIRARVMASHSPDGGGAGGGEVSAEALEMVINNDAELWGVLQPYEHLICGKNANGVLSLPAYFSPYNGGSLGHDERADAYAQLELRTLEQSLLATCVGSISELSDLVSRAMHHMQGRHPLCPGASPARQARQPPQPITWSPDALHTLYYFLRCPQMESMENPNLDPPRMTLNNERPFMLLPPLMEWMRVAITYAEHRRSLTVDSGDIRQAARLLLPGLDCEPRQLKPEHCFSSFRRLDARAATEKFNQDLGFRMLNCGRTDLINQAIEALGPDGVNTMDDQGMTPLMYACAAGDEAMVQMLIDAGANLDIQVPSNSPRHPSIHPDSRHWTSLTFAVLHGHISVVQLLLDAGAHVEGSAVNGGEDSYAETPLQLASAAGNYELVSLLLSRGADPLLSMLEAHGMGSSLHEDMNCFSHSAAHGHRNVLRKLLTQPQQAKADVLSLEEILAEGVEESDASSQGSGSEGPVRLSRTRTKALQEAMYYSAEHGYVDITMELRALGVPWKLHIWIESLRTSFSQSRYSVVQSLLRDFSSIREEEYNEELVTEGLQLMFDILKTSKNDSVIQQLATIFTHCYGSSPIPSIPEIRKTLPARLDPHFLNNKEMSDVTFLVEGKLFYAHKVLLVTASNRFKTLMTNKSEQDGDSSKTIEISDMKYHIFQMMMQYLYYGGTESMEIPTTDILELLSAASLFQLDALQRHCEILCSQTLSMESAVNTYKYAKIHNAPELALFCEGFFLKHMKALLEQDAFRQLIYGRSSKVQGLDPLQDLQNTLAERVHSVYITSRV

SEQ ID NO: 3262 - protein, 1456 aa, Homo sapiens
MLPSIRKASLALIRKMIHFCSEALLKEVCDSDVGHNLPTILVEITATVLDQEDDDDGHLLALQIIRDLVDKGGDIFLDQLARLGVISKVSTLAGPSSDDENEEESKPEKEDEPQEDAKELQQGKPYHWRDWSIIRGRDCLYIWSDAAALELSNGSNGWFRFILDGKLATMYSSGSPEGGSDSSESRSEFLEKLQRARGQVKPSTSSQPILSAPGPTKLTVGNWSLTCLKEGEIAIHNSDGQQATILKEDLPGFVFESNRGTKHSFTAETSLGSEFVTGWTGKRGRKLKSKLEKTKQKVRTMARDLYDDHFKAVESMPRGVVVTLRNIATQLESSWELHTNRQCIESENTWRDLMKTALENLIVLLKDENTISPYEMCSSGLVQALLTVLNNSMDLDMKQDCSQLVERINVFKTAFSENEDDESRPAVALIRKLIAVLESIERLPLHLYDTPGSTYNLQILTRRLRFRLERAPGETALIDRTGRMLKMEPLATVESLEQYLLKMVAKQWYDFDRSSFVFVRKLREGQNFIFRHQHDFDENGIIYWIGTNAKTAYEWVNPAAYGLVVVTSSEGRNLPYGRLEDILSRDNSALNCHSNDDKNAWFAIDLGLWVIPSAYTLRHARGYGRSALRNWVFQVSKDGQNWTSLYTHVDDCSLNEPGSTATWPLDPPKDEKQGWRHVRIKQMGKNASGQTHYLSLSGFELYGTVNGVCEDQLGKAAKEAEANLRRQRRLVRSQVLKYMVPGARVIRGLDWKWRDQDGSPQGEGTVTGELHNGTTQSWSSLVKNNCPDKTSAAAGSSSRKGSSSSVCSVASSSDISLGSTKTERRSEIVMEHSIVSGADVHEPIVVLSSAENVPQTEVGSSSSASTSTLTAETGSENAERKLGPDSSVRTPGESSAISMGIVSVSSPDVSSVSELTNKEAASQRPLSSSASNRLSVSSLLAAGAPMSSSASVPNLSSRETSSLESFVRRVANIARTNATNNMNLSRSSSDNNTNTLGRNVMSTATSPLMGAQSFPNLTTPGTTSTVTMSTSSVTSSSNVATATTVLSVGQSLSNTLTTSLTSTSSESDTGQEAEYSLYDFLDSCRASTLLAELDDDEDLPEPDEEDDENEDDNQEDQECEEVMILRRPSLQRRASSRSDVTHHAVTSQLPQVPAGAGSRPIGEQEEEEYETKGGRRRTWDDDYVLKRQFSALVPAFDPRPGRTNVQQTTDLEIPPPGTPHSELLEEVECTPSPRLALTLKVTGLGTTREVELPLTNFRSTIFYYVQKLLQLSCNGNVKSDKLRRIWEPTYTIMYREMKDSDKEKENGKMGCWSIEHVEQYLGADELPKNDLITYLQKNADAAFLRHWKLTGTNKSIRKNRNCSQLIAAYKDFCEHGTKSGLNQGAISTLQSSDILNLTKEQPQAKAGNGQNSCGVEDVLQLLRILYIVASDPYSRISQEDGDEQPQFTFPPDEFTS

SEQ ID NO: 3263 - protein, 724 aa, Homo sapiens [sequence omitted]

SEQ ID NO: 3264 - protein, 499 aa, Homo sapiens
MTESPLPALPAAAATFLMEQHEPRTPALALASGPCVYVYKNLRPYFKFSLPQLPPNPLEQDLWNQAKEDRIDPLTLKEMLESIRETAEEPLSIQSLRFLQLELSEMEAFVNQHKSNSIKRQTVITTMTTLKKNLADEDAVSCLVLGTENKELLVLDPEAFTILAKMSLPSVPVFLEVSGQFDVEFRLAAACRNGNIYILRRDSKHPKYCIELSAQPVGLIRVHKVLVVGSTQDSLHGFTHKGKKLWTVQMPAAILTMNLLEQHSRGLQAVMAGLANGEVRIYRDKALLNVIHTPDAVTSLCFGRYGREDNTLIMTTRGGGLIIKILKRTAVFVEGGSEVGPPPAQAMKLNVPRKTRLYVDQTLREREAGTAMHRAFQTDLYLLRLRAARAYLQALESSLSPLSTTAREPLKLHAVVQGLGPTFKLTLHLQNTSTTRPVLGLLVCFLYNEALYSLPRAFFKVPLLVPGLNYPLETFVESLSNKGISDIIKVGPALVPRGR

SEQ ID NO: 3265 - protein, 351 aa, Homo sapiens
MGPSSLNRHIRDHTGREPNEYQEYGKKSYTRNQCGRALSYHRSFPVRERTHPGGKPYDCKECGETFISLVSIRRHMLTHRGGVPYKCKVCGKAFDYPSLFRIHERSHTGEKPYECKQCGKAFSCSSYIRIHERTHTGDKPYECKQCGKAFSCSKYIRIHERTHTGEKPYECKQCGKAFRCASSVRSHERTHTGEKLFECKECGKALTCLASVRRHMIKHTGNGPYKCKVCGKAFDFPSSFRIHERTHTGEEPYDCKQCGKAFSCSSSFRKHERIHTGEKPYKCTKCGKAFSRSSYFRIHERTHTGEKPYECKQCGKAFSRSTYFRVHEKIHTGEKPYENPNPNASVVPVLS

SEQ ID NO: 3266 - protein, 817 aa, Homo sapiens
MGDAADPREMRKTFIVPAIKPFDHYDFSRAKIACNLAWLVAKAFGTENVPEELQEPFYTDQYDQEHIKPPVVNLLLSAELYCRAGSLFLKSDAAKPLLGHDAVIQALAQKGLYVTDQEKLVTERDLHKKPIQMSAHLAMIDTLMMAYTVEMVSIEKVIACAQQYSAFFQATDLPYDIEDAVMYWINKVNEHLKDIMEQEQKLKEHHTVEAPGGQKARYRKEQTLLKQLPCIPLVENLLKDGTDGCALAALIHFYCPDVVRLEDICLKETMSLADSLYNLQLIQEFCQEYLNQCCHFTLEDMLYAASSIKSNYSVFMAELFWWFEVVKPSFVQPRVVRPQGAEPVKDMPSIPVLNAAKRNVLDSSSDFPSSGEGATFTQSHHHLPSRYSRPQAHSSASGGIRRSSSMSYVDGFIGTWPKEKRSSVHGVSFDISFDKEDSVQRSTPNRGITRSISNEGLTLNNSHVSKHIRKNLSFKPINGEEEAESIEEELNIDSHSDLKSCVPLNTNELNSNENIHYKLPNGALQNRILLDEFGNQIETPSIEEALQIIHDTEKSPHTPQPDQIANGFFLHSQEMSILNSNIKLNQSSPDNVTDTKGALSPITDNTEVDTGIHVPSEDIPETMDEDSSLRDYTVSLDSDMDDASKFLQDYDIRTGNTREALSPCPSTVSTKSQPGSSASSSSGVKMTSFAEQKFRKLNHTDGKSSGSSSQKTTPEGSELNIPHVVAWAQIPEETGLPQGRDTTQLLASEMVHLRMKLEEKRRAIEAQKKKMEAAFTKQRQKMGRTAFLTVVKKKGDGISPLREEAAGAEDEKVYTDR

SEQ ID NO: 3267 - protein, 108 aa, Homo sapiens
MQFEFMIESILYARDAWLKEDGVIWPTMAALHLVPCSADKDYRSKVLFWDNAYEFNLSALKSLAVKEFFSKPKYNHILKPEDCLSEPCTILQLDMRTVQISDLEVRKR

SEQ ID NO: 3268 - protein, 154 aa, Homo sapiens
MIISVETFLEIHNPLFNIRMWKLKRKAVYVLHVEKPLLRSHNSLYIKEFILERNHMIVVHAEKPSVRSFILLYIRELILGRNLMIVLNVEKPSLRNRPLLYIREFTLGKNPMNVVNAGRPSPRNHPSLYIREYILGKNPMNVESVGRPFPRSHS

SEQ ID NO: 3269 - protein, 683 aa, Homo sapiens [sequence omitted]

SEQ ID NO: 3270 - protein, 209 aa, Homo sapiens
MWMRSDYMWKFIVLSFYSIHLKRLDLCRPFPFVLYCRYSREAYVELVHHIRESIPGVSLSSDFIAGFCGETEEDHVQTVSLLREVQYNMGFLFAYSMRQKTRAYHRLKDDVPEEVKLRRLEELITIFREEATKANQTSVGCTQLVLVEGLSKRSATDLCGRNDGNLKVIFPDAEMEDVNNPGLRVRAQPGDYVLVKVRSPFGLLACTVK

SEQ ID NO: 3271 - protein, 844 aa, Homo sapiens
MLVVEAKFDGEQLATDPVDHTDQPEFATELAWEIDRKALHQHRLQRTPIKLQCFALDPVTSAKETIGYIVLDLRTAQETKQAPKWYQLLSNKYTKFKSEIQISIALETDTKPPVDSFKAKGAPPRDGKVPAILAGLDPRDIVAVLNEEGGYHQIGPAEYCTDSFIMSVTIAFATQLEQLIPCTMKFPERQPEFFFYYSLLGNDVTNEPFNDLINPNFEPGRASVRIRSSVEILRVYLALQSKLQIHLCCGDQSLGSTEIPLTGLLKKGSTEINQHPVTVEGAFTLDPPNRAKQKLAPIPVELAPTVGVSVALQREGIDSQSLIELKTQNEHEPEHSKKKVLTPIKEKTLTGPKSPTVSPVPSHNQSPPTKDDATESEVESLQYDKDTKPNPKASSSVPASLAQLVTTSNASEVASGQKIAVPATSHHFCFSIDLRSIHALEIGFPINCILRYSYPFFGSAAPIMTNPPVEVRKNMEVFLPQSYCAFDFATMPHQLQDTFLRIPLLVELWHKDKMSKDLLLGIARIQLSNILSSEKTRFLGSNGEQCWRQTYSESVPVIAAQGSNNRIADLSYTVTVEDYGLVKMREIFISDSSQGVSAVQQKPSSLPPAPCPSEIQTEPRETLEYKAALELEMWKEMQEDIFENQLKQKELAHMQALAEEWKKRDRERESLVKKKVAEYTILEGKLQKTLIDLEKREQQLASVESELQREKKELQSERQRNLQELQDSIRRAKEDCIHQVELERLKIKQLEEDKHRLQLQLNDAENKYKILEKEFQQFKDQQNNKPEIRLQSEINLLTLEKVELERKLESATKSKLHYKQQWGRALKELARLKQREQESQMARL

SEQ ID NO: 3272 - protein, 104 aa, Homo sapiens
MRLIFSKYHSLRHYTNNSRKFFLPCSGYSILLYSPAKLLGLFKLISKPNSLDKYLPLYLGGIQAHHLPRQAHQQSRGIFCVIPSRLLHRILLFPFVSWPFSIIC

SEQ ID NO: 3273 - protein, 117 aa, Homo sapiens
MVTETMTKLRNELKALKEDAATFSSLRAMFATRCDEYVTQLDEMQRQLAAAEDEKKTLNTLLRMAIQQKLALTQRLEDLEFDHEQSRRSKGKLGKSKIGSPKIVSSLLPPYRHSAHN

SEQ ID NO: 3274 - protein, 323 aa, Homo sapiens
MSREMQDVDLAEVKPLVEKGETITGLLQEFDVQEQDIETLHGSVHVTLCGTPKGNRPVILTYHDIGMNHKTCYILTRFALNNPEMVEGLVLINVNPCAEGWMDWAASKISGWTQALPDMVVSHLFGKEEMQSNVEVVHTYRQHIVNDMNPGNLHLFINAYNSRRDLEIERPMPGTHTVTLQCPALLVVGDSSPAVDAVVECNSKLDPTKTTLLKMADCGGLPQISQPAKLAEAFKYFVQGMGYMPSASMTRLMRSRTASGSSVTSLDGTRSRSHTSEGTRSRSHTSEGTRSRSHTSEGAHLDITPNSGAAGNSAGPKSMEVSC

SEQ ID NO: 3275 - protein, 325 aa, Homo sapiens
MSDLQAAEGPGSWSPTARPGSAGGVGDCQGVEGSQAAASENEDLENKDTSLLASATDPEPCSSPHRPQMVSPVSKDATEDLRKATGPLEAQALVKQDLLPADQAQVLNEMAKYQVPQRSGDIVMIQSEHTGAIDVLSADLESADLLGDHRKVSPPLMAPPCIWTFAKVKEFKSKLGKEKNSRLVVKRGEVVTIRVPTHPEGKRVCWEFATDDYDIGFGVYFDWTPVTSTDITVQVSDSSDDEDEEEEEEEEIEEPVPAGDVERGSRSSLRGRYGEVMPVYRRDSHRDVQAGSHDYPGEGIYLLKFDNSYSLLRNKTLYFHIYYTS

SEQ ID NO: 3276 - protein, 131 aa, Homo sapiens [sequence omitted]

SEQ ID NO: 3277 - protein, 763 aa, Homo sapiens
MEASLTRRLLFKDRHFTCSKIIGRRFACFAQRLSHRRKQSQCDLLNESTGQLPTTCSSAASNSINWNCRVKMTQQMQNLHLCQSKKHSAPSSPNAAKRLYRNLSEKLKGSHSSFDEAYFRTRTDRLSLRKTSVNFQGNEAMFEAVEQQDMDAVQILLYQYTPEELDLNTPNSEGLTPLDIAIMTNNVPIARILLRTGARESPHFVSLESRAMHLNTLVQEAQERVSELSAQVENEGFTLDNTEKEKQLKAWEWRYRLYRRMKTGFEHARAPEMPTNVCLMVTSSTSLTVSFQEPLSVNAAVVTRYKVEWSMSEDFSPLAGEIIMDNLQTLRCTITGLTMGQQYFVQVSAYNMKGWGPAQTTTPACASPSNWKDYDDREPRHKGQSEVLEGLLQQVRALHQHYSCRESTKLQTTGRKQSVSRSLKHLFHSSNKFVKTLKRGLYIAIIFYYKDNILVTNEDQVPIVEIDDSHTSSITQDFLWFTKLSCMWEDIRWLRQSIPISSSSSTVLQTRQKMLAATAQLQNLLGTHNLGRVYYEPIKDRHGNILIVTIREVEMLYSFFNGKWMQISKLQSQRKSLSTPEEPTALDILLITIQDILSYHKRSHQRLFPGLYLGYLKLCSSVDQIKVLVTQKLPNILCHVKIRENNNISREEWEWIQKLSGSESMESVDHTSDCPMQLFFYELQMAVKALLQQINIPLHQARNFRLYTQEVLEMGHNVSFLLLLPASDDVCTAPGQNNPYTPHSGFLNLPLQMFELGIVACFT

SEQ ID NO: 3278 - protein, 100 aa, Homo sapiens
MPVGVAVAVIVSHTQWCGTRSFSCRKRERNYREKKRPVHHGLTTDSCFLQQGKSPLWPVWKLERRAKTGCCFSTLRWRFLGPHRARETVNMVTLLGAGDT

SEQ ID NO: 3279 - protein, 103 aa, Homo sapiens [sequence omitted]

SEQ ID NO: 3280 - protein, 109 aa, Homo sapiens
MVSLPPSNIKLVGRINEDDALDMEPSKTLLRACGFWSSVRQTSQRLSSAEAQRRHQQPHFSGKTIILNQIIITIPIIRRDNFFRIFGVLSASPAPQISVLFLKMKKFSN

SEQ ID NO: 3281 - protein, 264 aa, Homo sapiens
MSGLGFCISFGIRCNLGVAIVSMVNNSTTHRGGHVVVQKAQFSWDPETVGLIHGSFFWGYIVTQIPGGFICQKFAANRVFGFAIVATSTLNMLIPSAARVHYGCVIFVRILQGLVEGVTYPACHGIWSKWAPPLERSRLATTAFCGSYAGAVVAMPLAGVLVQYSGWSSVFYVYGSFGIFWYLFWLLVSYESPALHPSISEEERKYIEDAIGESAKLMNPLTVRDQIFGEGAGREASHEPAQRVDQGRFLQTLEETGLERKERG

SEQ ID NO: 3282 - protein, 712 aa, Homo sapiens
MLAEILTTKVLKPVVELLSNPDYINQMLLAQLAYREQMNEHHKRAYTYAPSYEDFIKLINSNSDVEFLKQLRYQIVVEIIQATTISSFPQLKRHKGKETAAMKADLLRARNMKRYINQLTVAKKQCEKRIRILGGPAYDQQEDGALDEGEGPQSQKILQFEDILANTFYREHFGMYMERMDKRALISFWESVEHLKNANKNEIPQLVGEIYQNFFVESKEISVEKSLYKEIQQCLVGNKGIEVFYKIQEDVYETLKDRYYPSFIVSDLYEKLLIKEEEKHASQMISNKDEMGPRDEAGEEAVDDGTNQINEQASFAVNKLRELNEKLEYKRQALNSIQNAPKPDKKIVSKLKDEIILIEKERTDLQLHMARTDWWCENLGMWKASITSGEVTEENGEQLPCYFVMVSLQEVGGVETKNWTVPRRLSEFQNLHRKLSECVPSLKKVQLPSLSKLPFKSIDQKFMEKSKNQLNKFLQNLLSDERLCQSEALYAFLSPSPDYLKVIDVQGKKNSFSLSSFLERLPRDFFSHQEEETEEDSDLSDYGDDVDGRKDALAEPCFMLIGEIFELRGMFKWVRRTLIALVQVTFGRTINKQIRDTVSWIFSEQMLVYYINIFRDAFWPNGKLAPPTTIRSKEQSQETKQRAQQKLLENIPDMLQSLVGQQNARHGIIKIFNALQETRANKHLLYALMELLLIELCPELRVHLDQLKAGQV

SEQ ID NO: 3283 - protein, 173 aa, Homo sapiens [sequence omitted]

SEQ ID NO: 3284 - protein, 952 aa, Homo sapiens
MVQMTVKDYMRSLHQFSETPILSRGTSFNSCYSTASVPQSIPEWLEFWEIDPVEILLDLGFGADEPDICMQIPARFLGCGSAARGINIRVFLEAQKQRMDIENPNLYGRFRQLEILDHVTNAFSSLLSDVSILPNRAEEKAGGESVQRTSVSAAKEHRRRMGKLLRRASKQNIRRDCNPEVSESFKVKDEVFVPFTKPWDCGAELAATSINHKQNHLSLSVEHQSLQACDDLLPYPPHGLLSKQWPCSSMPAKQAPPSCVSEGSVKGRTQKENLFQTNKLKSLSRLAGKGPDSFEMEEVQSFEEETGNPLDMTSGTVGARVDRANSCQSDSSGFLEEPLEPLPLQMPSLPNSQSPAENGGRKPRDQSHSLVSSQDCQLESDGPDSKSRASMSFSSQEVNALEQRASVSVMEEEFLLEAMEGPPELYIPDMACAKTTTRGECPRKDSHLWQLLPMPHAEYEVTRPTATSKYDHPLGFMVTHVTEMQDSFVRPEGAGKVQSHHNESQRSPGNDHTQDKFLHVDSEAPREEESSGFCPHTNHSLLVPESSSQCIPKHSEITPYATDLAQTSEKLIPHLHKLPGDPAQVKSRSGTLGQILPGTEAEMENLPLNTGSSRSVMTQMSSSLVSAAQRAVALGTGPRGTSLECTVCDPVTATETRLGTKARQLNDASIQTSALSNKTLTHGPQPLTKSVSLDSGFSSICPMGTCHAIPAHCCICYHHHPHCHGERQSPGPEPSVCRHCLCSLTGHQEAQFMTTLKALQDTTVRELCSCTVHEMEAMKTICQSFREYLEEIEQHLMGQQALFSRDMSEEEREEAEQLQTLREALRQQVAELEFQLGDRAQQIREGILLQLEVLTAEPPEHYSNLHQYNWIEESNGQTSCSKIHPGMAPRTVFPPDDGQEAPCSGGTQLAAFTPPTLENSTRMSPSSSAWAKLGPTPLSNCPVGEKDADVFL

SEQ ID NO: 3285 - protein, 105 aa, Homo sapiens
MQAICTLELHAVKTPNGVELSLNLKSRRMHKGTGPGPTSGHPPAGCRASLGAKARPVEPELCVARALCSSCTYYAPPPFSHHSSSSAILIYTDCTPPAQTTMSLL

SEQ ID NO: 3286 - protein, 275 aa, Homo sapiens
MTEQMTLRGTLKGHNGWVTQIATTPQFPDMILSASRDKTIIMWKLTRDETNYGIPQRALRGHSHFVSDVAFSSDNRQIVSGSRDKTIKLWNTLGVCKYTVQDESHSEWVSCVRFSPNSSNPIIVSCGWDKLVKVWNLANCKLKTNHIGHTGYLNTVTVSPDGSLCASGGKDGQAMLWDLNEGKHLYTLDGGDIINALCFSPNRYWLCAATGPSIKIWDLEGKIIVDELKQEVISTSSKAEPPQCTSLAWSADGQTLFAGYTDNLVRVWQVTIGTR

SEQ ID NO: 3287 - protein, 156 aa, Homo sapiens
MSRKSGIGHEASLKRKAEEKLESYRKKIHMKNQAEEKAAEQFRMRLKNKQDEMKLEGDLRRSQRACQQLDVQKNIQVPREAWYWLRLEEETEEDEEEKEQDEDEYKSEDLSVLEKLQILTSYLREEHLYCIWCGTAYEDKEDLSSNCPGPTSADHD

SEQ ID NO: 3288 - protein, 580 aa, Homo sapiens
MVDPSCITPIQLAPMKTIVRGNKPCKETSINGLLEDFDNISVTRSNSLRKESPPTPDQGASSHGPGHAEENGFITFSQYSSESDTTADYTTEKYREKSLYGDDLDPYYRGSHAAKQNGHVMKMKHGEAYYSEVKPLKSDFARFSADYHSHLDSLSKPSEYSDLKWEYQRASSSSPLDYSFQFTPSRTAGTSGCSKESLAYSESEWGPSLDDYDRRPKSSYLNQTSPQPTMRQRSRSGSGLQEPMMPFGASAFKTHPQGHSYNSYTYPRLSEPTMCIPKVDYDRAQMVLSPPLSGSDTYPRGPAKLPQSQSKSGYSSSSHQYPSGYHKATLYHHPSLQSSSQYISTASYLSSLSLSSSTYPPPSWGSSSDQQPSRVSHEQFRAALQLVVSPGDPREYLANFIKIGEGSTGIVCIATEKHTGKQVAVKKMDLRKQQRRELLFNEVVIMRDYHHDNVVDMYSSYLVGDELWVVMEFLEGGALTDIVTHTRMNEEQIATVCLSVLRALSYLHNQGVIHRDIKSDSILLTSDGRVSSVLRGFLDLMLVREPSQRATAQELLGHPFLKLAGPPSCIVPLMRQYRHH

SEQ ID NO: 3289 - protein, 127 aa, Homo sapiens
MQKPGFLRHLCGHSQEKHYPCSPCGESFTCPSWLVRHQDSHASQASPSCLVCERDSSTDEPPTGLRGAVWGSTPSNPSAALRFEGTGTELGLRRCPGDRQRGSGDQEGLGWGSLAQFSFSREDGECG

SEQ ID NO: 3290 - protein, 229 aa, Homo sapiens
MAGSDTAPFLSQADDPDDGPVPGTPGLPGSTGNPKSEEPEVPDQEGLQRITGLSPGRSALIVAVLCYINLLNYMDRFTVAGVLPDIEQFFNIGDSSSGLIQTVFISSYMVLAPVFGYLGDRYNRKYLMCGGIAFWSLVTLGSSFIPGEHFWLLLLTRGLVGVGEASYSTIAPTLIADLFVADQRSRMLSIFYFAIPVGSGLGYIAGSKVKDMAGDWHWALRVSLVLAWG

SEQ ID NO: 3291 - protein, 134 aa, Homo sapiens
MHTVTSQKCPPSFCPLRVSSREREKFCRCMWRTASTAADSDSSSGTRPGRGRLLTDSKAALPGASLYFYTVLLRYNLHAIQPIYFKCTMQGVCIYSQSCVSITIVLEHSSLQKKLPTHQQPLPISLICPALGNP

SEQ ID NO: 3292 - protein, 423 aa, Homo sapiens
MVVDFCRRFVARSLCIILMKHFCSSSVSEDLGCRRGDFSRKHYGSVELLISSDADGAIQRAGRFRVENGSSDENATALPGTWRRTDVHLENPEYHTRWYFKYFLGQVHQNYIGNDAEKSPFFLSVTLSDQNNQRVPQYRAILWRKTGTQKICLPYSPTKTLSVKSILSAKDGQLTDDEMFSNEIGSEPFQKFLNLLGDTITLKGWTGYRGGLDTKNDTTGIHSVYTVYQGHEIMFHVSTMLPYSKENKQQVERKRHIGNDIVTIVFQEGEESSPAFKPSMIRSHFTHIFALVRYNQQNDNYRLKIFSEESVPLFGPPLPTPPVFTDHQEFRDFLLVKLINGEKATLETPTFAQKRRRTLDMLIRSLHQDLMPDLHKNMLNRRSFSDVLPESPKSARKKEEARQAEFVRIGQVGFLLKPFLRDM

SEQ ID NO: 3293 - protein, 779 aa, Homo sapiens
MSRFPAVAGRAPRRQEEGERSRDLQEERLSAVCIADREEKGCTSQEGGTTPTFPIQKQRKKIIQAVRDNSFLIVTGNTGSGKTTQLPKYLYEAGFSQHGMIGVTQPRKVAAISVAQRVAEEMKCTLGSKVGYQVRFDDCSSKETAIKYMTDGCLLKHILGDPNLTKFSVIILDEAHERTLTTDILFGLLKKLFQEKSPNRKEHLKVVVMSATMELAKLSAFFGNCPIFDIPGRLYPVREKFCNLIGPRDRENTAYIQAIVKVTMDIHLNEMAGDILVFLTGQFEIEKSCELLFQMAESVDYDYDVQDTTLDGLLILPCYGSMTTDQQRRIFLPPPPGIRKCVISTNISATSLTIDGIRYVVDGGFVKQLNHNPRLGLDILEVVPISKSEALQRSGRAGRTSSGKCFRIYSKDFWNQCMPDHVIPEIKRTSLTSVVLTLKCLAIHDVIRFPYLDPPNERLILEALKQLYQCDAIDRSGHVTRLGLSMVEFPLPPHLTCAVIKAASLDCEDLLLPIAAMLSVENVFIRPVDPEYQKEAEQRHRELAAKAGGFNDFATLAVIFEQCKSSGAPASWCQKHWIHWRCLFSAFRVEAQLRELIRKLKQQSDFPKETFEGPKHEVLRRCLCAGYFKNVARRSVGRTFCTMDGRGSPVHIHPSSALHEQETKLEWIIFHEVLVTTKVYARIVCPIRYEWVRDLLPKLHEFNAHDLSSVARREVREDARRRWTNKENVKQLKDGISKDVLKKMQRRNDDKSISDARARFLERKQQRTQDHSDTRKETG

SEQ ID NO: 3294 - protein, 121 aa, Homo sapiens
MQICFLALWGGTMAVATSAETALRTSYASLKAKYISEHICVYVYTPYMHTFIRMHIRVHVLVNRSPWGLDNILAPRDVSNYKVMRLSFLCGSSGSESPSEGSPPAHSVTFTRPRGLQRCWC

SEQ ID NO: 3295 - protein, 202 aa, Homo sapiens
MQDPRAAMQRGSLPANVPTPRGLLGDAPNDPRGGTLLSVTGEVEPRGYLGPPHQGPPMHHVPGHESRGPPPHELRGGPLPEPRPLMAEPRGPMLDQRGPPLDGRGGRDPRGIDARGMEARAMEARGLDARGLEAQCLAPEDLYLVECRVPVQLTWGRLSPRDPDRSQSCREQECKEQVYRVEASLAALVPGRTKSLHRIMRR

SEQ ID NO: 3296 - protein, 140 aa, Homo sapiens
MVVPAALMAQGSLVSRWSSRFLSSCDFHPGPRTQPSVGTAGALSAHWRSSITEAQRTSLAPQTFRGTAMAAPSSAVRKVLGVRFATHVTGQCPIQIFQGRVRAALGDSLSSPALQRPCSLSSLTLQLVFLLDSASPKQTV

SEQ ID NO: 3297 - protein, 220 aa, Homo sapiens [sequence omitted]

SEQ ID NO: 3298 - protein, 105 aa, Homo sapiens; identical to SEQ ID NO: 3212

SEQ ID NO: 3299 - protein, 863 aa, Homo sapiens [sequence omitted]

SEQ ID NO: 3300 - protein, 734 aa, Homo sapiens
MTSLAQQLQRLALPQSDASLLSRDEVASLLFDPKEAATIDRDTAFAIGCTGLEELLGIDPSFEQFEAPLFSQLAKTLERSVQTKAVNKQLDENISLFLIHLSPYFLLKPAQKCLEWLIHRFHIHLYNQDSLIACVLPYHETRIFVRVIQLLKINNSKHRWFWLLPVKQSGVPLAKGTLITHCYKDLGFMDFICSLVTKSVKVFAEYPGSSAQLRVLLAFYASTIVSALVAAEDVSDNIIAKLFPYIQKGLKSSLPDYRAATYMIICQISVKVTMENTFVNSLASQIIKTLTKIPSLIKDGLSCLIVLLQRQKPESLGKKPFPHLCNVPDLITILHGISETYDVSPLLRYMLPHLVVSIIHHVTGEETEGMDGQIYKRHLEAILTKISLKNNLDHLLASLLFEEYISYSSQEEMDSNKVSLLNEQFLPLIRLLESKYPRTLDVVLEEHLKEIADLKKQELFHQFVSLSTSGGKYQFLADSDTSLMLSLNHPLAPVRILAMNHLKKIMKTSKEGVDESFIKEAVLARLGDDNIDVVLSAISAFEIFKEHFSSEVTISNLLNLFQRAELSKNGEWYEVLKIAADILIKEEILSENDQLSNQVVVCLLPFVVINNDDTESAEMKIAIYLSKSGICSLHPLLRGWEEALENVIKSTKPGKLIGVANQKMIELLADNINLGDPSSMLKMVEDLISVGEEESFNLKQKVTFHVILSVLVSCCSSLKETHFPFAIRVFSLLQ

SEQ ID NO: 3301 - protein, 154 aa, Homo sapiens
MQGIDRWIPSIPPLQNHSAVNRRHFSAPQKLHADCEKEMLDGGVPGTTVRVSFDFSCLEMVRELWMWNVEEEEHEVGISTWGGQHCGCPAKSLPGPHPGGVSAPQSASQLMVKLLVWQKSVHKLRKIAAQSEEWSCILNKISTHPFVSKEHDGT

SEQ ID NO: 3302 - protein, 819 aa, Homo sapiens
MMNLEKNFDKTTLFNHMRTDKRGKCSDLNEYGTSCDKTTAVEYNKVHMAMTHYECNERGINFSRKSPLTQSQRTITGWSAFESNKCEENFSQSSAHIVHQKTQAGDKFGEHNECTDALYQKLDFTAHQRIHTDFTAHQKFYLSDEHGKCRKSFYWKAHLIQHERPHSGEKTYQYEECAKSFCSSSHPIQHPGTYVGFKLYECNECGKAFCQNSNLSKHLRIHTKEKPCDNNGCGRSYKSPLIGHQKTDAEMELCGGSEYGKTSHLKGHQRILMGEKPYECIECGKTFSKTSHLRAHQRIHTGEKPYECVECEKTFSHKTHLSVHQRVHTGEKPYECNDCGKSFTYNSALRAHQRIHTGEKPYECSDCEKTFAHNSALRAHHRIHTGEKPYECNECGRSFAHISVLKAHQRIHTREKPYECNECGRSFTYNSALRAHQRIHTGRKPYECSDCEKTFAHNSALKIHQRIHTGEKPYKCNECEKTFAHNSALRAHQNIHTGEKLYECSECGKTFFQKTRLSTHRRIHTGEKPYECSKCGKTFSQKSYLSGHERIHTGEKPYECNVCGKTFVYKAALIVHQRIHTGEKPYECNECGKTFSQRTHLCAHQRIHTGEKPYECNECGKTFADNSALRAHHRIHTGEKPYECNDCGKTFSKTSHLRAHLRTHSGEKPYECSECGKTFSEKSYVSAHQRVHTGEKPYECNVCGKPFAHNSTLRVHQRIHTGEKSYECNDCGKTFSQKSHLSAHQRIHTGEKPYECNECGKAFAQNSTLRVHQRIHTGEKPYECDECGKTFVRKAALRVHHTRMHTREKTLACNGFGKS

SEQ ID NO: 3303 - protein, 189 aa, Homo sapiens
MGVSVDVHQVYKYPFEQVVASFLRKYPNPMDKNVISVKIMEEKRDESTGVIYRKRIAICQNVVPEILRKSLSTLVILCWKKVSILKVPNIQLEEESWLNPRERNMAIRSHCLTWTQYASMKEESVFRESMENPNWTEFIQRGRISITGVGFLNCVLETFASTFLRQGAQKGIRIMEMLLKEQCGAPLAE

SEQ ID NO: 3304 - protein, 861 aa, Homo sapiens
MELKRGKTFIKSSLQVSHEKPPDPAAVAAAREGTGPWSVLPGGQQRPHSEKGPQASPSAQEYDRCPNKGAQLDPKGGPAALCGATFKPVRKCKTHDSMSGAGRATAATGQLVGSASFPGSPGSRRMIDYRHFVPQMPFVPAVAKSIPRKRISLKRPKKCFRNLFHIRRNKTEDLASLAAEGKSLPSPGDPSDPGGRRSKAFLPPGEGPGLDGLCQDLLDSELLADASFGLCRALCEDVASLQSFDSLTGCGEVFADESSVPSLELNEGPESPTQAAQGLESKVPRGPLQGSVEQLASPAQNEASDFTRFWDSVNRSVRQQQRALLGPWLSGPQGTDRDQPRLDTAGLAELPLCPCRDPRSGSKASSIDTGTPKSEQPESVSTSDEGYYDSFSPGLEEDKKEAESPGTPAATFPRDSYSGDALYELFHDPSEGPLGPSPDDDLCVSESLSGPALGTPLSICSFRVGAEENLAPAPGPDLLSQGFLQSSWKGKECLLKLCDTELAITMGIVSWLRRGPTPRAPPTPGQPAAPPGSQGAPRAPTEKLGGREGLASDAGGATVCSAPSRQELWAHPGTTGLLAGESKALGGATQGTGTLSRDASREEETRGHSEGLFSSMESAATSTTDTSGKNKAPVPSTWPCSQKEPGPPGVLGCFRGPWRPGHGGDTLDAEPMLAGCVARVAALKISSNEQPPAAWPPRQDMGSGLFGQRWARGPDMLEQKQSSSSPSMTTIHGLPYSASTQDQRCRDRVQDLSWLRVEPTGLGVQAWASVEDQPLQLSTEAVEQVAHGSQLDSEPRSAPAARWSSQGHHPESLGLTLNSQQEGGVSASAPECRCSLLAREGLLCGQPEVGASGPAMAEPHL

SEQ ID NO: 3305 - protein, 242 aa, Homo sapiens
MGTSALTVSSALPSVGTSAHTLSSALPSVGTSALTVSSALPSVNGDVCTHRMSSALPSVGTSALTVSSALPSVGTSALTECPRHCPPWGRLHSRNVLGTALRGDVCTHSVLGTALRGDVCTHSVLGTALRGDVCTHRMSSALPSMGTSALTVSSALPSVGTSALTECPRHCPPWGRLHSQCPRHCPPWGRLHSQCPRHCPPWGRLHSQNVLGTALRGDVCTHSVLGTALRDVCTQCLWPSSG

SEQ ID NO: 3306 - protein, 241 aa, Homo sapiens; identical to SEQ ID NO: 2632

SEQ ID NO: 3307 - protein, 571 aa, Homo sapiens
MHFDPGFEEQLFWGSQQAMNSGKTKSHFQLDPESQCSFGSFVSFRPDQGITLGSPQRHDARAPPPLACGPSESTLKEGIPGPRNLDLPGLWDVPAWESTQHPWPVCGESCWENNHLVMHQRGHSKDRTRRAWEKFNKRAETQMPWSSPRVQRHFRCGVCGKSFRRKLCLLRHLAAHTGRGPFRNADGEICFRHELTHPSHRLPQQGEKPAQCTPCGKRSLPVDSTQARRCQHSREGPASWREGRGASSSVHSGQKPGSRLPQEGNSHQEGDTEALQHGAEGPCSCSECGERSPMSARLASPCRAHTGEKPFQCAHCTKRFRLRRLLQVHQHAHGGERPFSCRKCGKGFAKQCKLTEHIRVHSGEKPFRCAKCGRNFRQRGQLLRHQRLHTDEKPFQCPECGLSFRLESMLRAHRLRHGGERPFSCSECGRGFTHQCKLREHLRVHSGERPFQCLKCDKRFRLKGILKAHQHTHSKERPFSCGECGKGFTRQSKLTEHLRVHSGERPFQCPECNRSFRLKGQLLSHQRLHTGERPFQCPECDKRYRVKADMKAHQLLHSGEMPFSCECGRAL

SEQ ID NO: 3308 - protein, 108 aa, Homo sapiens
MWEPLIFYFLRWSFAPFAQAVVHWHDFDSLQPPPPGFKRFSCLSLPSSWDYRHVLPRPAHFVFLVETGFDHVGQAGLKLLTSGDLSTLASQSAGITGLSHSALPVNYN

SEQ ID NO: 3309 - protein, 432 aa, Homo sapiens
MPSQISVVNVDQLWEDSVLTVKFPKLMVPRFSFPAPSSEDDVFIPTVREVQCPEANIDTALCKESPGLWGASILKAGAGVPGEQPVDLNLPLEAPPISKVRVHIQGAQVESQEVTIHSIVTPEFVDLSVPRTFSTQIVRESEIPTSEIQTPSYGFSLLKVKIPEPHTQARVYTTMTQHSRTQEGTEEAPIQATPGVDSISGDLQPDTGEPFEMISSSVNVLGQQTLTFEVPSGHQLADSCSDEEPAEILEFPPDDSQEATTPLADEGRAPKDKPESKKSGLLWFWLPNIGFSSSVDETGVDSKNDVQRSAPIQTQPEARPEAELPKKQEKAGWFRFPKLGFSSSPTKKSKSTEDGAELEEQKLQEETITFFDARESFSPEEKEEGELIGPVGTGLDSRVMVTSAARTELILPEQDRKADDESKGSGLGPNEG

SEQ ID NO: 3310 - protein, 443 aa, Homo sapiens
MAAARLLPVPAGPQAKLTFEDVAVLLSQDEWDRLCPAQRGLYRNVMMETYGNVVSLGLPGSKPDIISQLERGEDPWVLDRKGAKKSQGLWSDYSDNLKYDHTTACTQQDSLSCPWECETKGESQNTDLSPKPLISEQTVILGKTPLGRIDQENNETKQSFCLSPNSVDHREVQVLSQSMPLTPHQAVPSGERPYMCVECGKCFGRSSHLLQHQRIHTGEKPYVCSVCGKAFSQSSVLSKHRRIHTGEKPYECNECGKAFRVSSDLAQHHKIHTGEKPHECLECRKAFTQLSHLIQHQRIHTGERPYVCPLCGKAFNHSTVLRSHQRVHTGEKPHRCNECGKTFSVKRTLLQHQRIHTGEKPFQCTECGKAFSLKATLIVHLRTHTGEKPYECNSCGKAFSQYSVLIQHQRIHTGEKPYECGECGRAFNQHGHLIQHQKVHRKL

SEQ ID NO: 3311 - protein, 111 aa, Homo sapiens
MYKGMIDCLMKTARAEGFFGMYRGGLLRSPGRLGSRCERMGHGGLVFLPLLRGWGQGCQGVLPDEPLCSWVETEAALGPGKASGDPQSTPPATASVRAGEPSLPACLSLPG

SEQ ID NO: 3312 - protein, 116 aa, Homo sapiens
MSLRWESCLPACQFPPQGRAPLPARVWEAVQAVLAALGKPRDSHNTPGTVGLGGTTGNSGLECVCLFLGYECVSSPRGLLSSHIVWFGVNDGGRHLLIDGRCPPFRESPSMGGCRA

SEQ ID NO: 3313 - protein, 200 aa, Homo sapiens
MPRGLADKQGPEECDAVALLSLINSCDHFVVDRKKVTEVIKCRNEIMHSSEMKVSSTWLRDFQMKIQNFLNEFKNIPEIVAVYSRIEQLLTSDWAVHIPEEDQRDGCECEMGTYLSESQVNEIEMQLLKEKLQEIYLQAEEQEVLPEELSNRLEVVKEFLRNNEDLRNGLTEDMQKLDSLCLHQKLDSQEPGRQTPDRKA

SEQ ID NO: 3314 - protein, 923 aa, Homo sapiens [sequence omitted]

SEQ ID NO: 3315 - protein, 140 aa, Homo sapiens
MIKQGLKSGIQFHKLNRRVHTHVHTVHVPVHTRRTHFVGTHMCTLHAPVHTRTTHFVGTHMCTLHAPVHTHTTHFIGTHVHTACPSAHTHNPFRRDTHVHTACPSAHTHNPFRRDTHVHTACPNAQTHNRFCRVLAEFSL

SEQ ID NO: 3316 - protein, 240 aa, Homo sapiens
MQTTYVLQSLHLRIPEISNITTTPHTLPAAWLTMFDAVLILLLIPLKDKLVDPILRRHGLLPSSLKRIAVGMFFVMCSAFAAGILESKRLNLVKEKTINQTIGNVVYHAADLSLWWQVPQYLLIGISEIFASIAGLEFAYSAAPKSMQSAIMGLFFFFSGVGSFVGSGLLALVSIKAIGWMSSHTDFGNINGCYLNYYFFLLAAIQGATLLLFLIISVKYDHHRDHQRSRANGVPTSRRA

SEQ ID NO: 3317 - protein, 557 aa, Homo sapiens
MTLLTFRDVAIEFSLEEWKCLDLAQQNLYRDVMLENYRNLFSVGLTVCKPGLITCLEQRKEPWNVKRQEAADGHPAMSSHFTQDLLPEQGIQDAFPKRILRGYGNCGLDNLYLRKDWESLDECKLQKDYNGLNQCSSTTHSKIFQYNKYVKIFDNFSNLHRRNISNTGEKPFKCQECGKSFQMLSFLTEHQKIHTGKKFQKCGECGKTFIQCSHFTERENIDTGEKPYKCQECNNVIKTCSVLTKNRIYAGGEHYRCEEFGKVFNQCSHLTEHEHGTEEKPCKYEECSSVFISCSSLSNQQMILAGEKLSKCETWYKGFNHSPNPSKHQRNEIGGKPFKCEECDSIFKWFSDLTKHKRIHTGEKPYKCDECGKAYTQSSHLSEHRRIHTGEKPYQCEECGKVFRTCSSLSNHKRTHSEEKPYTCEECGNIFKQLSDLTKHKKTHTGEKPYKCDECGKNFTQSSNLIVHKRIHTGEKPYKCEECGRVFMWFSDITKHKKTHTGEKPYKCDECGKNFTQSSNLIVHKRIHTGEKPYKCEKCGKAFTQFSHLTVHESIHT

SEQ ID NO: 3318 - protein, 160 aa, Homo sapiens [sequence omitted]

SEQ ID NO: 3319 - protein, 458 aa, Homo sapiens
MQATSNLLNLLLLSLFAGLDPSKTQISPKEGWQVYSSAQDPDGRCICTVVAPEQNLCSRDAKSRQLRQLLEKVQNMSQSIEVLNLRTQRDFQYVLKMETQMKGLKAKFRQIEDDRKTLMTKHFQELKEKMDELLPLIPVLEQYKTDAKLITQFKEEIRNLSAVLTGIQEEIGAYDYEELHQRVLSLETRLRDCMKKLTCGKLMKITGPVTVKTSGTRFGAWMTDPLASEKNNRVWYMDSYTNNKIVREYKSIADFVSGAESRTYNLPFKWAGTNHVVYNGSLYFNKYQSNIIIKYSFDMGRVLAQRSLEYAGFHNVYPYTWGGFSDIDLMADEIGLWAVYATNQNAGNIVISQLNQDTLEVMKSWSTGYPKRSAGESFMICGTLYVTNSHLTGAKVYYSYSTKTSTYEYTDIPFHNQYFHISMLDYNARDRALYAWNNGHQVLFNVTLFHIIKTEDDT

SEQ ID NO: 3320 - protein, 185 aa, Homo sapiens [sequence omitted]

SEQ ID NO: 3321 - protein, 146 aa, Homo sapiens
MVQPWLSLATQERQPQPILCVVLSLQVATKANPPHCPDCGSLCLRFPVMFRGASPFLQARSCIYLIWRCQAFCKGGLFQFLEMELENVAGNINMAGNGICLQPLLLNPSSGQSLLSCRWLETCRWKSSPPSSAALGCRAGMPEMSG

SEQ ID NO: 3322 - protein, 699 aa, Homo sapiens [sequence omitted]

SEQ ID NO: 3323 - protein, 139 aa, Homo sapiens
MEIFKSSSKDQEKNHIEIQYKSSQLNTEFFKIDSLKIAETMNCVAPGFIVFLTLLSLCLCLAFLSTYTPSVWFCVSMQSFEWGLVEVVGSMQQVRFIELPILSPLSQASLSHLSEYCNWSPFLQFPYSRLSSTLLPELP

SEQ ID NO: 3324 - protein, 660 aa, Homo sapiens
MEESKTLKSENHEPKKNVICEESKAVQVIGNQTLKARNDKSVKEIENSSPNRNSSKKNKQNDICIEKTEVKSCKVNAANLPGPKDLGLVLRDQSHCKAKKFPNSPVKAEKATISQAKSEKATSLQAKAEKSPKSPNSVKAEKASSYQMKSEKVPSSPAEAEKGPSLLLKDMRQKTELQQIGKKIPSSFTSVDKVNIEAVGGEKCALQNSPRSQKQQTCTDNTGDSDDSASGIEDVSDDLSKMKNDESNKENSSEMDYLENATVIDESALTPEQRLGLKQAEERLERDHIFRLEKRSPEYTNCRYLCKLCLIHIENIQGAHKHIKEKRHKKNILEKQEESELRSLPPPSPAHLAALSVAVIELAKEHGITDDDLRVRQEIVEEMSKVITTFLSECSLRLYGSSLTRFALKSSDVNIDIKFPPKMNHPDLLIKVLGILKKNVLYVDVESDFHAKVPVVVCRDRKSGLLCRVSAGNDMACLTTDLLTALGKIEPVFIPLVLAFRYWAKLCYIDSQTDGGIPSYCFALMVMFFLQQRKPPLLPCLLGSWIEGFDPKRMDDFQLKGIVEEKFVKWECNSSSATEKNSIAEENKAKADQPKDDTKKTETDNQSNAMKEKHGKSPLALETPNRVSLGQLWLELLKFYTLDFALEEYVICVRIQDILT

SEQ ID NO: 3325 - protein, 104 aa, Homo sapiens [sequence omitted]

SEQ ID NO: 3326 - protein, 675 aa, Homo sapiens
MAETLSGLGDSGAAGAAALSSASSETGTRRLSDLRVIDLRAELRKRNVDSSGNKSVLMERLKKAIEDEGGNPDEIEITSEGNKKTSKRSSEELAEAPTEAPSPEARDSKEDGRKFDFDACNEVPPAPKESSTSEGADQKMSSPEDDSDTKRLSKEEKGRSSCGRNFWVSGLSSTTRATDLKNLFSKYGKVVGAKVVTNARSPGARCYGFVTMSTAEEATKCINHLHKTELHGKMISVEKAKNEPVGKKTSDKRDSDGKKEKSSNSDRSTNLKRDDKCDRKDDAKKGDDGSGEKSKDQDDQKPGPSERSRATKSGSRGTERTVVMDKSKGVPVISVKTSGSKERASKSQDRKSASREKRSVVSFDKVKEPRKSRDSESHSRVRERSEREQRMQAQWEREERERLEIARERLAFQRQRLERERMERERLERERMHVEHERRREQERIHREREELRRQQELRYEQERRPAVRRPYDLDRRDDAYWPEAKRAALDERYHSDFNRQDRFHDFDHRDRGRYPDHSVDRREGSRSMMGEREGQHYPERHGGPERHGRDSRDGWGGYGSDKRMSEGRGLPPPPRGRRDWGDHGRREDDRSWQGTADGGMMDRDHKRWQGGERSMSGHSGPGHMMNRGGMSGRGSFAPGGASRGHPIPHGGMQGGFGGQSRGSRPSDARFTRRY

SEQ ID NO: 3327 - protein, 131 aa, Homo sapiens
MGGKLPQQDTRLFTVVSKALREWKWFFCPAGNSSGKTSLSRPSLSIQHWQSVDEGIKSDGRRLFFFFFELESQSVAQVGVQWWRSQLTATSTSQVQAILSASASRAAGITGSRHHARLIFVFFSRDGVSPC

SEQ ID NO: 3328 - protein, 120 aa, Homo sapiens
MANSGAASSALAQMPSCRCRICLLLCILALSSAALVSRGGPLGAPAPACLRGYADKSPWTGLCLLGLLPSSDESPDHLPGVPQFSKVLAAPLRQAVAARQQPPPTAQELEETAQPSRATS

SEQ ID NO: 3329 - protein, 178 aa, Homo sapiens
MPGTRCAFRGPGDPVHGRRVTLGPADPAPSPGGSGRGRTQRHASKAQAPRTRRTDSMSRTAMPGEEVLESSQEALHVTERKYLKRDWCKTQPLKQTIHEEGCNSRTIINRFCYGQCNSFYIPRHIRKEEGSFQSCSFCKPKKFTTMMVTLNCPELQPPTKKKRVTRVKQCRCISIDLD

SEQ ID NO: 3330 - protein, 330 aa, Homo sapiens
MRGPEPGPQPTMEGDVLDTLETLGYKGPLLEEQALTKAAEGGLSSPEFSELCIWLGSQIKSLCNLEESITSAGRDDLESFQLEISGFLKEMACPYSVLISGDIKDRLKKKEDCLKLLLFLSTELQASQILQNKKHKNSQLDKNSEVYQEVQAMFDTLGIPKSTTSDIPHMLNQVESKVKDILSKVQKNHVGKPLLKMDLNSEQAEQLERINDALSCEYECRRRMLMKRLDVTVQSFGWSDRAKVKTDDIARIYQPKRYALSPKTTITMAHLLAAREDLSKIIRTSSGTSREKTACAINKVGVSFSTVENELMISYLMFLQILVYFSFMSW

SEQ ID NO: 3331 - protein, 353 aa, Homo sapiens [sequence omitted]

SEQ ID NO: 3332 - protein, 113 aa, Homo sapiens [sequence omitted]

SEQ ID NO: 3333 - protein, 237 aa, Homo sapiens
MDKILNVEETYLTVLVKIGPGFHTRECFLLKSILCFSPSYRMSEGDSVGESVHGKPSVVYRFFTRLGQIYQSWLDKSTPYTAVRWVVTLGLSFVYMIRVYPLQGWYIVTYALGIYHLNLFIAFLSPKVDPSLMEDSDDGPSLPTKQNEEFRPFIRRLPEFKFWHAATKGILVAMVCTFFDAFNVPVFWPILVMYFIMLFCITMKRQIKHMIKYRYIPFTHGKRRYRGKEDAGKAFAS

SEQ ID NO: 3334 - protein, 544 aa, Homo sapiens [sequence omitted]

SEQ ID NO: 3335 - protein, 100 aa, Homo sapiens
MSLNSLSSILKIYLTTFALLLTFFFFFLIQSFSLSSRLECGGAISARCSLHLPGSSNSPASASLVAGVTGVHHHTQIIFVFLVETGFHHIGQAGLKLLTL

SEQ ID NO: 3336 - protein, 103 aa, Homo sapiens
MLGKLSKTKPICRPESATFPSVSRKCSCRPGAGLRPRDAGLRCWVSHQGLEDLWACGRRSHIAQLQSPLPTALHCATISVATRGLHSQGNCWLPPPGSPSSFI

SEQ ID NO: 3337 - protein, 136 aa, Homo sapiens [sequence omitted]

SEQ ID NO: 3338 - protein, 146 aa, Homo sapiens [sequence omitted]

SEQ ID NO: 3339 - protein, 554 aa, Homo sapiens
MAAADLSHGHYLSGDPVCLHEEKTPAGRIVADCLTDCYQDSVTFDDVAVDFTQEEWTLLDSTQRSLYSDVMLENYKNLATVGGQIIKPSLISWLEQEESRTVQGGVLQGWEMRLETQWSILQQDFLRGQTSIGIQLEGKHNGRELCDCEQCGEVFSEHSCLKTHVRTQSTGNTHDCNQYGKDFLTLCEKTSTGEKLSEFNQSEKIFSLTPNIVYQRTSTQEKSFECSHCGKSFINESYLQAHMRTHNGEKLYEWRNYGPGFIDSTSLSVLIETLNAKKPYKCKECGKGYRYPAYLSIHMRTHTGEKPYECKECGKAFNYSNSFQIHGRTHTGEKPYVCKECGKAFTQYSGLSMHVRSHSGDKPYECKECGKSFLTSSRLIQHIRTHTGEKPFVCVECGKAFAVSSNLSGHLRTHTEEKACECKICGKVFGYPSCLNNHMRTHSAQKPYTCKECGKAFNYSTHLKIHMRIHTGEKPYECKQCGKAFSHSSSFQIHERTHTGEKPYECKECGKAFTCSSSFRIHEKTHTEEKPYKCQQCGKAYSHPRSLRRHEQIH

SEQ ID NO: 3340 - protein, 634 aa, Homo sapiens
MYPNWGRYGGSSHYPPPPVPPPPPVALPEASPGPGYSSSTTPAAPSSSGFMSFREQHLAQLQQLQQMHQKQMQCVLQPHHLPPPPLPPPPVMPGGGYGDWQPPPPPMPPPPGPALSYQKQQQYKHQMLHHQRDGPPGLVPMELESPPESPPVPPGSYMPPSQSYMPPPQPPPSYYPPTSSQPYLPPAQPSPSQSPPSQSYLAPTPSYSSSSSSSQSYLSHSQSYLPSSQASPSRPSQGHSKSQLLAPPPPSAPPGNKTTVQQEPLESGAKNKSTEQQQAAPEPDPSTMTPQEQQQYWYRQHLLSLQQRTKVHLPGHKKGPVVAKDTPEPVKEEVTVPATSQVPESPSSEEPPLPPPNEEVPPPLPPEEPQSEDPEEDARLKQLQAAAAHWQQHQQHRVGFQYQGIMQKHTQLQQILQQYQRIIQPPPHIQTMSVDMQLRHYEMQQQQFQHLYQEWEREFQLWEEQLHSYPHKDQLQEYEKQWKTWQGHMKATQSYLQEKVNSFQNMKNQYMGNMSMPPPFVPYPQMPPPLPTMPPPVLPPSLPPPVMPPALPATVPPPGMPPPVMPPSLPTSVPPPGMPPSLSSAGPPPVLPPPSLSSAGPPPVLPPPSLSSTAPPPVMPLPPLSSATCDLCLL

SEQ ID NO: 3341 - protein, 185 aa, Homo sapiens
MKLREVMGSSNRYFHGHILKPLENSLPLRAIDALSYLYKQGTNVYCCGLQEKGYSLILKPTNQLLTRVNKALKVLCEIGAYRDFELQVFASFKKNTPFLYLVAAIKSHTKLASSRANCHLGSLWSHSILRMTWNSQINMKEAAFIPRPMLTITAPCPEVELRFGLRNRFLIRLKIILQYFLWKLI

SEQ ID NO: 3342 - protein, 165 aa, Homo sapiens
MLCGLSRETPGEADDGPYSKGGKNAGGADVSLACRRQSIPEEFRGITVVELIKKEGSTLGLTISGGTDKDGKPRVSNLRPGGLAARSDLLNIGDYIRSVNGIHLTRLRHDEIITLLKNVGERVVLEVEYELPPPAPENNPRIISKTVDVSLYKEGNSFGFVLRGQ

SEQ ID NO: 3343 - protein, 559 aa, Homo sapiens [sequence omitted]

SEQ ID NO: 3344 - protein, 167 aa, Homo sapiens
MKHQRVHTGERPYECNECGKLFSQSSSLNSHRRLHTGERPYQCSECGKFFNQSSSLNNHRRLHTGERPYECSECGKTFRQRSNLRQHLKVHKPDRPYECSECGKAFNQRPTLIRHQKIHIRERSMENVLLPCSQHTPEISSENRPYQGAVNYKLKLVHPSTHPGEVP

SEQ ID NO: 3345 - protein, 559 aa, Homo sapiens [sequence omitted]

SEQ ID NO: 3346 - protein, 625 aa, Homo sapiens
MHQIRKSEYTQPTPIQCQGVPVALSGRDMIGIAKTGSGKTAAFIWPMLIHIMDQKELEPGDGPIAVIVCPTRELCQQIHAECKRFGKAYNLRSVAVYGGGSMWEQAKALQEGAEIVVCTPGRLIDHVKKKATNLQRVSYLVFDEADRMFDMGFEYQVRSIASHVRPDRQTLLFSATFRKKIEKLARDILIDPIRVVQGDIGEANEDVTQIVEILHSGPSKWNWLTRRLVEFTSSGSVLLFVTKKANAEELANNLKQEGHNLGLLHGDMDQSERNKVISDFKKKDIPVLVATDVAARGLDIPSIKTVINYDVARDIDTLLTPKDSNFAGDLVRNLEGANQHVSKELLDLAMQNAWFRKSRFKGGKGKKLNIGGGGLGYRERPGLGSENMDRGNNNVMSNYEAYKPSTGAMGDRLTAMKAAFQSQYKSHFVAASLSNQKAGSSAAGASGWTSAGSLNSVPTNSAQQGHNSPDSPVTSAAKGIPGFGNTGNISGAPVTYPSAGAQGVNNTASGNNSREGTGGSNGKRERYTENRGSSRHSHGETGNRHSDSPRHGDGGRHGDGYRHPESSSRHTDGHRHGENRHGGSAGRHGENRGANDGRNGESRKEAFNRESKMEPPKRKKSRWDS

SEQ ID NO: 3347 - protein, 196 aa, Homo sapiens [sequence omitted]

SEQ ID NO: 3348 - protein, 174 aa, Homo sapiens [sequence omitted]

SEQ ID NO: 3349 - protein, 120 aa, Homo sapiens
MLAIVHSYVTHKTVKEEEKQKLLQRGSELQNEHQQLEERDRRLASAVQKCLELKTSLLARQRGTQSSLDRLRALLRLIQGEQLLQVTMTTTSPAPLLAGPWTKPSVAATHPTVQHPQGHN

SEQ ID NO: 3350 - protein, 215 aa, Homo sapiens
MGAPAGQLEGCLNVSAMPDSPASSVKWRRACPCRCHSHCWRWPYLQPVPASSSSSWASFQGSWQPESAASLRAPTAQASRRWLGPGWRWTVSSRCHRRRDSSRPAWLLAPAPGGPEWFLPGDPRKLLPGLGTLLRKCPLGWQPLPLPLPHPGWRTRGATQGNRGLERLRTSPSHPRGSALAGVRLCVGGHTWVHSVFRSVCIWRSVCVSVYLGLC

SEQ ID NO: 3351 - protein, 214 aa, Homo sapiens
MYLKIIRAIYDKPTANIILNGQKLEAFPLKASTRQGCPLSPLLFNIVLEVLTRVFRQEKEIKCIQIGKEEVKLSLFADDVIIYLENSIISAQKFLKLISNFSKVSGYKINVQKSQAFLYTNNRQTESQIMSELPFTIAKKRIKYLGIQLTRDVKDLFKENYKPLFKEIREDTNKSKNIPYSWIGRINIVKMAILPKVIYRFNAIPIKLSLTFFT

SEQ ID NO: 3352 - protein, 176 aa, Homo sapiens
MDPPWVHFHISVTSVLLPKEHNLPNRLTAHTCVPQPHALRPAAQGPPFTPGHRALPGPPVCPSMGLCQPRGRLWSEEGFCSEPLLSPSQPPALSQLVNLYLGRSHFLWKEPAAMSWLEENVHEVLQAVDAGDPAVEACENRRKVLYQRAPRNIHRHVILSEIKEAVAALPPVREKG

SEQ ID NO: 3353 - protein, 168 aa, Homo sapiens [sequence omitted]

SEQ ID NO: 3354 - protein, 145 aa, Homo sapiens
MDENYNLLPHGVNFQDAIFPDTQENRRMFSSLFQFSNCSQGQQLATFSSDWEIQEDSRLMCSSVQKALFEEEDHVKKLQQKVATLEKRNRQLRERVKKVKRSLRQARKKGRHLELANQKLSEKLAAGALPHINARGPVRPPYLRG

SEQ ID NO: 3355 - protein, 214 aa, Homo sapiens [sequence omitted]

SEQ ID NO: 3356 - protein, 559 aa, Homo sapiens [sequence omitted]

SEQ ID NO: 3357 - protein, 164 aa, Homo sapiens
MAAVVLHQVREPREGLPALAAGIGLPAGQARLVSPRALPGLQPCAVAGARDALEALLVPILGVRPLGSQFRRAPVRGRLLDDGLPLRSGGRVGLRVLGVLRVRGLPRLLFLLLSGARRGIGKGVPRGRLRRQLRQHPRGGGLLAGAPSALLPPPAFWNKVRALA

SEQ ID NO: 3358 - protein, 114 aa, Homo sapiens
MRGHSTILRAKQRRGTELLPRDVWPQKVLSRRVMKGRRFPRILEPEDAARVRVSKPGRVRGPGRRALGALSQGGGGGRGGGRPGVGGGGSALPGGLGGAPAQTPRASRRTRMMF

SEQ ID NO: 3359 - protein, 267 aa, Homo sapiens
MNKATGSLDITQSIEDDPLLDAQLLPHHSLQAHFRPRFHPLPTVIIVNLLWFIHLVFVVLAFLTGVLCSYPNPNEDKCPGNYTNPLKVQTVIILGKVILWILHLLLECYIQYHHSKIRNRGYNLIYRSTRHLKRLALMIQSSGNTVLLLILCMQHSFPEPGRLYLDLILAILALELICSLICLLICTVKIRRFNKAKPEPDILEEEKIYAYPSNITSETGFRTISSLEEIVEKQGDTIEYLKRHNALLSKRLLALTSSDLGCQPSRT

SEQ ID NO: 3360 - protein, 139 aa, Homo sapiens
MGHRASSSCEPLPLSSLLGNKTLPLGLGHPPGAFLPFPGRTASLFQPSAFKEKQGHRSAQCPFPSGWTLAPPAFTPWREGESAEPVPPCPAGPHDLVCGCLGGTCFGEAATSQLDSPLRIPCMGMVGEKRSLCVSSLKF

SEQ ID NO: 3361 - protein, 190 aa, Homo sapiens
MSEPTSTPTKLMAEASTPALPRSATLPQELPVPGLSQAATMPAPLPSPSSCDLTQQLLPQTVLQSTPAPMAQFSAQSSMFQTIKDQLEQRTRILQANIRWQQEELHKIQEQLCLVQDSNVQVRPEPDCVSKSRRTPRQQQQRPDARPADGAGGAPPQLPCLPTVAPAARTGPAAATAALPAGTGTNLFAQ

SEQ ID NO: 3362 - protein, 438 aa, Homo sapiens
MIRKLFIVLLLLLVTIEEARMSSLSFLNIEKTEILFFTKTEETILVSSSYENKRPNSSHLFVKIEDPKILQMVNVAKKISSDATNFTINLVTDEEGETNVTIQLWDSEGRQERLIEEIKNVKVKVLKQKDSLLQAPMHIDRNILMLILPLILLNKCAFGCKIELQLFQTVWKRPLPVILGAVTQFFLMPFCGFLLSQIVALPEAQAFGVVMTCTCPGGGGGYLFALLLDGDFTLAILMTCTSTLLALIMMPVNSYIYSRILGLSGTFHIPVSKIVSTLLFILVPVSIGIVIKHRIPEKASFLERIIRPLSFILMFVGIYLTFTVGLVFLKTDNLEVILLGLLVPALGLLFGYSFAKVCTLPLPVCKTVAIESGMLNSFLALAVIQLSFPQSKANLASVAPFTVAMCSGCEMLLIILVYKAKKRCIFFLQDKRKRNFLI

SEQ ID NO: 3363 - protein, 200 aa, Homo sapiens
MGSRESVEGSGRSGGSPFLPFSWFTDSGKGSASSGSTTSPTCSPKHEGFSPKKSASQESTLSDDSTPPSSSPKIPSGPWQEAKCSYPYHTLSQSSDEFLDEPLPPVHHWTSQQVGQWLQSLNLEQYAAEFAARQVDGPQLLQLDGSKLKSLGLSNSHDRALVKRKLKEMAAAAEKERKAQEKAARQREKLRRREQEAKKS

SEQ ID NO: 3364 - protein, 356 aa, Homo sapiens
MGYVREYILWAASKSQLLAHQFIWNMKTNIYLDEEGHQKDPDIGDLLDQLVEEITGSLSGPAKDFYQREFDFFNKITNVSAIIKPYPKGDERKKACLSALSEVKVQPGCYLPSNPEAIVLDIDYKSGTPMQSAAKAPYLAKFKVKRCGVSELEKEGLRCRSDSEDECSTQEADGQKISWQAAIFKVGDDCRQDMLALQIIDLFKNIFQLVGLDLFVFPYRVVATAPGCGVIECIPDCTSRDQLGRQTDFGMYDYFTRQYGDESTLAFQQHGRLQPPAVPAADQGQTQRQHYAGQEGSYHPHRSASHSATLLSLHPWHPGVDRDPHPTERRMPRTTLPGVSGSSSEVRTVGHQAVLL

SEQ ID NO: 3365 - protein, 106 aa, Homo sapiens
MSFRFVNLIFPFISCHIENANKLLSRTPRSYLCYQMCCEHSTIFHRCFLEIYVHCSGGEGLDSLRLFTCQLSPAVNGNIYTYIYIFYLEYNLNMKVYSLHFLLIYI

SEQ ID NO: 3366 - protein, 484 aa, Homo sapiens
MFPNSILGHPPFTPNHQQHNNFFTLSPTVYSHQQLIDAQFNFQNADLSRAVSLQQLTYGNVSPIQTSASPLFRGRKRLSDEKNLPLDGKRQRFHSPHQEPTVVNQIVPLSGERRYSMPPLFHTHYVPDIVRCVPPFREIAFLEPREITLPEAKDKLSQQILELFETCQQQISDLKKKELCRTQLQREIQLLFPQSRLFLVGSSLNGFGTRSSDGDLCLVVKEEPCFFQVNQKTEARHILTLVHKHFCTRLSGYIERPQLIRAKVPIVKFRDKVSCVEFDLNVNNIVGIRNTFLLRTYAYLENRVRPLVLVIKKWASHHQINDASRGTLSSYSLVLMVLHYLQTLPEPILPSLQKIYPESFSPAIQLHLVHQAPCNVPPYLSKNESNLGDLLLGFLKYYATEFDWNSQMISVREAKAIPRPDGIEWRNKYICVEEPFDGTNTARAVHEKQKFDMIKDQFLKSWHRLKNKRDLNSILPVRAAVLKR

SEQ ID NO: 3367 - protein, 314 aa, Homo sapiens
MAVGCVIELASKVASGELKNGFAVVRPPGHHAEESTAMGFCFFNSVAITAKYLRDQLNISKILIVDLDVHHGNGTQQAFYADPSILYISLHRYDEGNFFPGSGAPNEVGTGLGEGYNINIAWTGGLDPPMGDVEYLEAFRTIVKPVAKEFDPDMVLVSAGFDALEGHTPPLGGYKVTAKCFGHLTKQLMTLADGRVVLALEGGHDLTAICDASEACVNALLGNELEPLAEDILHQSPNMNAVISLQKIIEIQSKYWKSVRMVAVPRGCALAGAQLQEETETVSALASLTVDVEQPFAQEDSRTAGEPMEEEPAL

SEQ ID NO: 3368 - protein, 144 aa, Homo sapiens [sequence omitted]

SEQ ID NO: 3369 - protein, 348 aa, Homo sapiens
MIPFPHPQVTDALGRYSNYILSSTVESPSLRSMNFEKQGERVLCFHGPLLYEAKCVKVAIKDKQVKYFIHYSGWNKNWDEWVPESRVLKYVDTNLQKQRELQKANQEQYAEGKMRGAAPGKKTSGLQQKNVEVKTKKNKQKTPGNGDGGSTSETPQPPRKKRARVDPTVENEETFMNRVEVKVKIPEELKPWLVDDWDLITRQKQLFYLPAKKNVDSILEDYANYKKSRGNTDNKEYAVNEVVAGIKEYFNVMLGTQLLYKFERPQYAEILADHPDAPMSQVYGAPHLLRLFVRIGAMLAYTPLDEKSLALLLNYLHDFLKYLAKNSATLFSASDYEVAPPEYHRKAV

SEQ ID NO: 3370 - protein, 231 aa, Homo sapiens
MEDSPLPDLRDIELKLGRKVPESLVRSLRGEEPVPRERGRDPCGGSGGGGGGGGGGGGCSSGSSYCSFPPSLSSSSSSSPTSGSPRGSHSSALERLETKLHLLRQEMVNLRATDVRLMRQLLVINESIESIKWMIEEKATITSRGSSLSGSLCSLLESQSTSLRGSYNSLHDGSDGLDGISVGSYLDTLADDVPGHQTPSDLDQFSDSSLIEDSQALHKRPKLDSEYYCFG

SEQ ID NO: 3371 - protein, 752 aa, Homo sapiens
MLRRGSQALRRFSTGRVYFKNKLKLALIGQSLFGQEVYSHLRKEGHRVVGVFTVPDKDGKADPLALAAEKDGTPVFKLPKWRVKGKTIKEVAEAYRSVGAELNVLPFCTQFIPMDIIDSPKHGSIIYHPSILPRHRGASAINWTLIMGDKKAGFSVFWADDGLDTGPILLQRSCDVEPNDTVDALYNRFLFPEGIKAMVEAVQLIADGKAPRIPQPEEGATYEGIQKKENAEISWDQSAEVLHNWIRGHDKVPGAWTEINGQMVTFYGSTLLNSSVPPGEPLEIKGAKKPGLVTKNGLVLFGNDGKALTVRNLQFEDGKMIPASQYFSTGETSVVELTAEEVKVAETIKVIWAGILSNVPIIEDSTDFFKSGASSMDVARLVEEIRQKCGGLQLQNEDVYMATKFEGFIQKVVRKLRGEDQEVELVVDYISKEVNEIMVKMPYQCFINGQFTDADDGKTYDTINPTDGSTICKVSYASLADVDKAVAAAKDAFENGEWGRMNARERGRLMYRLADLLEENQEELATIEALDSGAVYTLALKTHIGMSVQTFRYFAGWCDKIQGSTIPINQARPNRNLTFTKKEPLGVCAIIIPWNYPLMMLAWKSAACLAAGNTLVLKPAQVTPLTALKFAELSVKAGFPKGVINIIPGSGGIAGQRLSEHPDIRKLGFTGSTPIGKQIMKSCAVSNLKKVSLELGGKSPLIIFNDCELDKAVRMGMGAVFFNKGENCIAAGRLFVEESIHDEFVTRVVEEI

SEQ ID NO: 3372 - protein, 179 aa, Homo sapiens
MQLFIPNTFPPYLPPPPLLLRWWSVGESMFFLSTHLPSVLIKGLKQLHENQKNNPTLLENKSGSGVPNSNTNSSVQHVQIRVARLEDNTAISSSPMAALQIPVQITHVSSADSPATVDSETITLNSGTLQTFEILPSFHLQPTGTPGTYLLQTSSSQGLPLTLTASPTEPSKSPCKFNC

SEQ ID NO: 3373 - protein, 361 aa, Homo sapiens [sequence omitted]

SEQ ID NO: 3374 - protein, 815 aa, Homo sapiens
MEVRASLQKVSGSSDSVATMNSEEFVLVPQYADDNSTKHEEKPQLKIVSNGDEQLEKAMEEILRDSEKRPSSLLVDCQSSSEISDHSFGDIPASQTNKPSLQLILDPSNTEISTPRPSSPGGLPEEDSVLFNKLTYLGCMKVSSPRNEVEALRAMATMKSSSQYPFPVTLYVPNVPEGSVRIIDQSSNVEIASFPIYKVLFCARGHDGTTESNCFAFTESSHGSEEFQIHVFSCEIKEAVSRILYSFCTAFKRSSRQVSDVKDSVIPTPDSDVFTFSVSLEVKEDDGKGNFSPVPKDRDKFYFKLKQGIERKVVITVQQLSNKELAIERCFGMLLSPGRNVKNSDMHLLDMESMGKSYDGRAYVITGMWNPNAPVFLALNEETPKDKQVYMTVAVDMVVTEVVEPVRFLLETVVRVYPANERFWYFSRKTFTETFFMRLKQSEGKGHTNAGDAIYEVVSLQRESDKEEPVTPTSGGGPMSPQDDEAEEESDNELSSGTGDVSKDCPEKILYSWGELLGKWHSNLGARPKGLSTLVKSGVPEALRAEVWQLLAGCHDNQAMLDRYRILITKDSAQESVITRDIHRTFPAHDYFKDTGGDGQESLYKICKAYSVYDEDIGYCQGQSFLAAVLLLHMPEEQAFCVLVKIMYDYGLRDLYRNNFEDLHCKFYQLERLMQEQLPDLHSHFSDLNLEAHMYASQWFLTLFTAKFPLCMVFHIIDLLLCEGLNIIFHVALALLKTSKEDLLQADFEGALKFFRVQLPKRYRAEENARRLMEQACNIKVPTKKLKKYEKEYQTMRESQLQQEDPMDRYKFVYL

SEQ ID NO: 3375 - protein, 718 aa, Homo sapiens
MMERNGTENSCSRTRGWLQQDNDAKPWLWKFSNCFSRPEQTLPHSPQTKEYMENKKVAVELKDVPSPLHAGSKLFPAVPLPDIRSLQQPKIQLSSVPKVSCCAHCPNEPSTSPMRFGGGGGGSGGTSSLIHPGALLDSQSTRTITCQVGSGFAFQSASSLQNASARNNLAGIASDFPSMCLESNLSSCKHLPCCGKLHFQSCHGNVHKLHQFPSLQGCTSAGYFPCSDFTSGAPGHLEEHISQSELTPHLCTNSLHLNVVPPVCLKGSLYCEDCLNKPARNSIIDAAKVWPNIPPPNTQPAPLAVPLCNGCGTKGTGKETTLLLATSLGKAASKFGSPEVAVAGQVLENLPPIGVFWDIENCSVPSGRSATAVVQRIREKFFKGHREAEFICVCDISKENKEVIQELNNCQVTVAHINATAKNAADDKLRQSLRRFANTHTAPATVVLVSTDVNFALELSDLRHRHGFHIILVHKNQASEALLHHANELIRFEEFISDLPPRLPLKMPQCHTLLYVYNLPANKDGKSVSNRLRRLSDNCGGKVLSITGCSAILRFINQDSAERAQKRMENEDVFGNRIIVSFTPKNRELCETKSSNAIADKVKSPKKLKNPKLCLIKDASEQSSSAKATPGKGSQANSGSATKNTNVKSLQELCRMESKTGHRNSEHQQGHLRLVVPTHGNSSAAVSTPKNSGVAEPVYKTSQKKENLSARSVTSSPV

SEQ ID NO: 3376 - protein, 138 aa, Homo sapiens [sequence omitted]

SEQ ID NO: 3377 - protein, 348 aa, Homo sapiens
MESEKIYMTANPYLCTECGKGYTCLASLTQHQKTHIGEKPYECKICGKSFTRNSNLVQHQRIHTGEKPYECNECGKAFSQSTNLIQHQRVHTGEKPYECNECEKTFSHRSSLRNHERIHTGEKPYPCNECGKAFSHISALTQHHRIHTGKKPYECTECGKTFSRSTHLIEHQGIHSEEKSYQCKQCRKVFCHSTSLIRHQRTHTGEKPYECNECGKAFSHTPAFIQHQRIHTGEKPYECNACGKAFNRSAHLTEHQRTHTGEKPYVCKECGKTFSRSTHLTEHLKIHSCVKPYQCNECQKLFCYRTSLIRHQRTHTGEKPYQCNECGKSFSLSSALTKHKRIHTRERP

SEQ ID NO: 3378 - protein, 108 aa, Homo sapiens
MASSITLSPAPGTDRHTVGRRQGPGQAPVQSEAAPLLALDLQRCPLLPRRSTSPSIPGAALRPSKNSSCLSRPDAYNGRVLPRTEPQRHVHWLLRGKRGQPQPCCITE

SEQ ID NO: 3379 - protein, 119 aa, Homo sapiens [sequence omitted]

SEQ ID NO: 3380 - protein, 281 aa, Homo sapiens
MREAIFSPGHLPRGAAPLRGPAGTLVPWMPTPGECWLSLSVSAAGEKPYKCSVCESAFNRKDKLKRHMLIHEPFKKYKCPFSTHTGCSKEFNRPDKLKAHILSHSGMKLHKCALCSKSFSRRAHLAEHQRAHTGNYKFRCAGCAKGFSRHKYLKDHRCRLGPQKDKDLQTRRPPQRRAAPRSCGSGGRKVLTPLPDPLGLEELKDTGAGLVPEAVPGKPPFAEPDAVLSIVVGGAVGAETELVVPGHAEGLGSNLALAELQAGAEGPCAMLAVPVYIQASE

SEQ ID NO: 3381 - protein, 184 aa, Homo sapiens
MAAISFPRKRLRRNFTAETIARRSRAFEQFLGHLQAVPELRHAPDLQDFFVLPELRRAQSLTCTGLYREALALWANAWQLQAQLGTPSGPDRPLLTLAGLAVCHQELEDPGEARACCEKALQLLGDKSLHPLLAPFLEAHVRLSWRLGLDKRQSEARLQALQEAGLTPTPPPSLKELLIKEVLD

SEQ ID NO: 3382 - protein, 105 aa, Homo sapiens
MTMSVKQKVKQRTGTAGAAAGCCLCRCSCSRAGHDVARPLRPAPPRLPLGALCSPPCCSNEEPRQPAARPHWLRQRSKFHEGTPTSARGTRCCSFHFTEKNLPGD

SEQ ID NO: 3383 - protein, 613 aa, Homo sapiens [sequence omitted]

SEQ ID NO: 3384 - protein, 167 aa, Homo sapiens
MEVASEKKTDPSSLGATSASFNFGKKVDSSVLGSLSSVPLTGFSFSPGNSSLFGKDTTQSKPVSSPFPTKPLEGQAEGDSGECKGGDEEENDEPPKVVVTEVKEEDAFYSKKCKLFYKKDNEFKEKGIGTLHLKPTANQKTQLLVRADTNLGGYLFSVGTKSSSHSI

SEQ ID NO: 3385 - protein, 747 aa, Homo sapiens
MGKKGKVGKSRRDKFYHLAKETGYRSRSAFKLIQLNRRFQFLQKARALLDLCAAPGGWLQVAAKFMPVSSLIVGVDLVPIKPLPNVVTLQQDITTERCRQALRKELKTWKVDVVLNDGAPNVGASWVHDAYSQAHLTLMALRLACDFLARGGSFITKVFRSRDYQPLLWIFQQLFRRVQATKPQASRHESAEIFVVCQGFLAPDKVDSKFFDPKFAFKEVEVQAKTVTELVTKKKPKAEGYAEGDLTLYHRTSVTDFLRAANPVDFLSKASEIMVDDEELAQHPATTEDIRVCCQDIRVLGRKELRSLLNWRTKLRRYVAKKLKEQAKALDISLSSGEEDEGDEEDSTAGTTKQPSKEEEEEEEEEQLNQTLAEMKAQEVAELKRKKKKLLREQRKQRERVELKMDLPGVSIADEGETGMFSLSTIRGHQLLEEVTQGDMSAADTFLSDLPRDDIYVSDVEDDGDDTSLDSDLDPEELAGVRGHQGLRDQKRMRLTEVQDDKEEEEEENPLLVPLEEKAVLQEEQANLWFSKGSFAGIEDDADEALEISQAQLLFENRRKGRQQQQKQQLPQTPPSCLKTEIMSPLYQDEAPKGTEASSGTEAATGLEGEEKDGISDSDSSTSSEEEESWEPLRGKKRSRGPKSDDDGFEIVPIEDPAKHRILDPEGLALGAVIASSKKAKRDLIDNSFNRYTFNEDEGELPEWFVQEEKQHRIRQLPVGKKEVEHYRKRWREINARPIKKVAEAKA

SEQ ID NO: 3386 - protein, 437 aa, Homo sapiens [sequence omitted]

SEQ ID NO: 3387 - protein, 106 aa, Homo sapiens
MRALRLGAEDQPLPAWIPQLRAVYCRPIPARPACQAARLPAASAASSGLRCQPSPDEARPLQALLDGRGLCVNASAVSRLRAYLLPAPSPARTGCLIPSSTPSIQR

SEQ ID NO: 3388 - protein, 1124 aa, Homo sapiens [sequence omitted]

SEQ ID NO: 3389 - protein, 150 aa, Homo sapiens [sequence omitted]

SEQ ID NO: 3390 - protein, 140 aa, Homo sapiens [sequence omitted]

SEQ ID NO: 3391 - protein, 151 aa, Homo sapiens
MEDEGNKLCQAPPWPGQTSPVMAEYGTLLQDLTNNITLEDLEQLKSACKEDIPSEKSEEITTGSAWFSFLESHNKLDKDNLSYIEHIFEISRRPDLLTMVVDYRTRVLKISEEDELDTKLTRIPSAKKYKDIIRQPSEEEIIKLAPPPKKA

SEQ ID NO: 3392 - protein, 139 aa, Homo sapiens
MYVHKSAALLYTNSNQAENHIKNSTPFTIAEKKNLGIYLNEVKDVYKENYKTLLKEIIDDTNKWKHIPCSWMGRIHIVKMTILLKAIYKFNTIPIKISPSFLTELEKTILKFTWNKKKKSPHSQSQSKQKEQIWKHHIT

SEQ ID NO: 3393 - protein, 343 aa, Homo sapiens
MDNQAERESEAGVGLQRDEDDAPLCEDVELQDGDLSPEEKIFLREFPRLKEDLKGNIDKLRALADDIDKTHKKFTKANMVATSTAVISGVMSLLGLALAPATGGGSLLLSTAGQGLATAAGVTSIVSGTLERSKNKEAQARAEDILPTYDQEDREDEEEKADYVTAAGKIIYNLRNTLKYAKKNVRAFWKLRANPRLANATKRLLTTGQVSSRSRVQVQKAFAGTTLAMTKNARVLGGVMSAFSLGYDLATLSKEWKHLKEGARTKFAEELRAKALELERKLTELTQLYKSLQQKVRSRARGVGKDLTGTCETEAYWKELREHVWMWLWLCVCLCVCVYVQFT

SEQ ID NO: 3394 - protein, 149 aa, Homo sapiens
MNYLFFFLTTSGLYCLSGSHGSNVKYIVLTYFNCSWSLTSPGFRDVLKGSQLWQVTDSWEMERTKEYSSCLTFLPTADIVQARVMEELNLLASQAAPIPTSQCTAPPHLFSPLSLTSPFIMSHKSGTVGSHYNLLCHRDSIFLISNHVS

SEQ ID NO: 3395 - protein, 699 aa, Homo sapiens
MDISSSPNIRLRRHSSQIEGVRQMHNNAPRSQMATERDLMAWSRRVVVNELNNGVSRVQEECRTAKGDIEISLYTVEKKKKPSYTTQRNDYEPSCGRSLRRTQRKRQHTYQTRSNIEHNSQASCQNSGVQEDSDSSSEEDETVGTSDASVEDPVVEWQSESSSSDSSSEYSDWTADAGINLQPPKRQTRQTTRKICSSSDEENLKSLEERQKKPKQTRKKKGGLVSIAGEPNEEWFAPQWILDTIPRRSPFVPQMGDELIYFRQGHEAYVRAVRKSKIYSVNLQKQPWNKMDLREQEFVKIVGIKYEVGPPTLCCLKLAFLDPISGKMTGESFSIKYHDMPDVIDFLVLHQFYNEAKERNWQIGDRFRSIIDDAWWFGTVESQQPFQPEYPDSSFQCYSVHWDNNEREKMSPWDMEPIPEGTAFPDEVGAGVPVSQEELTALLYKPQEGEWGAHSRDEECERVIQGINHLLSLDFASPFAVPVDLSAYPLYCTVVAYPTDLNTIRRRLENRFYRRISALMWEVRYIEHNARTFNEPDSPIVKAAKIVTDVLLRFIGDQSCTDILDTYNKIKAEERNSTDAEEDTEIVDLDSDGPGTSSGRRVKCRGRRQSLKCNPDAWKKQCKELLSLIYEREDSEPFRQPADLLSYPGHQEQEGESSESVVPERQQDSSLSEDYQDVIDTPVDFSTVKETLEAGNYDL

SEQ ID NO: 3396 - protein, 665 aa, Homo sapiens
MQGPPLLTAAHLLCVCTAALAVAPGPRFLVTAPGIIRPGGNVTIGVELLEHCPSQVTVKAELLKTASNLTVSVLEAEGVFEKGSFKTLTLPSLPLNSADEIYELRVTGRTQDEILFSNSTRLSFETKRISVFIQTDKALYKPKQEVKFRIVTLFSDFKPYKTSLNILIKDPKSNLIQQWLSQQSDLGVISKTFQLSSHPILGDWSIQVQVNDQTYYQSFQVSEYVLPKFEVTLQTPLYCSMNSKHLNGTITAKYTYGKPVKGDVTLTFLPLSFWGKKKNITKTFKINGSANFSFNDEEMKNVMDSSNGLSEYLDLSSPGPVEILTTVTESVTGISRNVSTNVFFKQHDYIIEFFDYTTVLKPSLNFTATVKVTRADGNQLTLEERRNNVVITVTQRNYTEYWSGSNSGNQKMEAVQKINYTVPQSGTFKIEFPILEDSSELQLKAYFLGSKSSMAVHSLFKSPSKTYIQLKTRDENIKVGSPFELVVSGNKRLKELSYMVVSRGQLVAVGKQNSTMFSLTPENSWTPKACVIVYYIEDDGEIISDVLKIPVQLVFKNKIKLYWSKVKAEPSEKVSLRISVTQPDSIVGIVAVDKSVNLMNASNDITMENVVHELELYNTGYYLGMFMNSFAVFQECGLWVLTDANLTKDYIDGVYDNLFGTQEAL

SEQ ID NO: 3397 - protein, 109 aa, Homo sapiens
MAPATSPCVTVDCHITLAPDLAYCTSQHPAQARAQGRPQRTCVELRAQRSQASVQSPSLPPGTGSWTLLRSMLAGPTHGTRLCTTPLRSTSTACTISAVTTATRTWHWP

SEQ ID NO: 3398 - protein, 143 aa, Homo sapiens
MSRTAYTVGALLLLLGTLLPAAEGKKKGSQGAIPPPDKALHVTERKYLKRDWCKTQPLKQTIHEEGCNSRTIINRFCYGQCNSFYIPRHIRKEEGSFQSCSFCKPKKFTTMMVTLNCPELQPPTKKKRVTRVKQCRCISIDLD

SEQ ID NO: 3399 - protein, 898 aa, Homo sapiens
MKQTRKQYLHLRAAALFIQQCYRSKKIAAQKREEYMQMRESCIKLQAFVRGYLVRKQMRLQRKAVISLQSYFRMRKARQYYLKMYKAIIVIQNYYHAYKAQVNQRKNFLQVKKAATCLQAAYRGYKVRQLIKQQSIAALKIQSAFRGYNKRVKYQSVLQSIIKIQRWYRAYKTLHDTRTHFLKTKAAVISLQSAYRGWKVRKQIRREHQAALKIQSAFRMAKAQKQFRLFKTAALVIQQNFRAWTAGRKQCMEYIELRHAVLVLQSMWKGKTLRRQLQRQHKCAIIIQSYYRMHVQQKKWKIMKKAALLIQKYYRAYSIGREQNHLYLKTKAAVVTLQSAYRGMKVRKRIKDCNKAAVTIQSKYRAYKTKKKYATYRASAIIIQRWYRGIKITNHQHKEYLNLKKTAIKIQSVYRGIRVRRHIQHMHRAATFIKAMFKMHQSRISYHTMRKAAIVIQVRCRAYYQGKMQREKYLTILKAVKVLQASFRGVRVRRTLRKMQTAATLIQSNYRRYRQQTYFNKLKKITKTVQQRYWAMKERNIQFQRYNKLRHSVIYIQAIFRGKKARRHLKMMHIAATLIQRRFRTLMMRRRFLSLKKTAILIQRKYRAHLCTKHHLQFLQVQNAVIKIQSSYRRWMIRKRMREMHRAATFIQSTFRMHRLHMRYQALKQASVVIQQQYQANRAAKLQRQHYLRQRHSAVILQAAFRGMKTRRHLKSMHSSATLIQSRSRSLLVRRRFISLKKATIFVQRKYRATICAKHKLYQFLHLRKAAITIQSSYRRLMVKKKLQEMQRAAVLIQATFRMHRTYITFQTWKHASILIQQHYRTYRAAKLQRENYIRQWHSAVVIQAAYKGMKARQLLREKHKASIVIQSTYRMYRQYCFYQKLQWATKIIQEKYR

SEQ ID NO: 3400 - protein, 117 aa, Homo sapiens
MEGDRSGLPLLTGVASFYSLIWLCHILLIGPFYRALIGPFCRVLIGLFLQSADWCVYKPLARHRVLIGPFLQRAVWCVYKPLARHRALIGAFLQSADWCVYKPLARHRVLIGVFTIL

SEQ ID NO: 3401 - protein, 238 aa, Homo sapiens [sequence omitted]

SEQ ID NO: 3402 - protein, 231 aa, Homo sapiens
MTWVSLLNQVGDRVSRNNFLGFPASELQARIRTYNQHYNNLLRGAVSQRLYILLPLDCGVPDNLSMADPNIRFLDKLPQQTGDRAGIKDRVYSNSIYELLENGQRAGTCVLEYATPLQTLFAMSQYSQAGFSREDRLEQAKLFCRTLEDILADAPESQNNCRLIAYQEPADDSSFSLSQEVLRHLRQEEKEEVTVGSLKTSAVPSTSTMSQEPELLISGMEKPLPLRTDFS

SEQ ID NO: 3403 - protein, 243 aa, Homo sapiens
MQRARPTLWAAALTLLVLLRGPPVARAGASSAGLGPVVRCGSGLRCQPSPDEARPLQALLDGRGLCVNASAVSRLRAYLLPAPPAPGNASESEEDRSAGSVESPSVSSTHRVSDPKFHPLHSKIIIIKKGHAKDSQRYKVDYESQSTDTQNFSSESKRETEYGPCRREMEDTLNHLKFLNVLSPRGVHIPNCDKKGFYKKKQCRPSKGRKRGFCWCVDKYGQPLPGYTTKGKEDVHCYSMQSK

SEQ ID NO: 3404 - protein, 461 aa, Homo sapiens
MPGEMRNDLYITIERGEFEKGGKSVARNVEVTMFIVDSSGQTLKDFISFGSGEPPASEYHSFVLYHNNSPRWSELLKLPIPVDKFRGAHIRFEFRHCSTKEKGEKKLFGFSFVPLMQEDGRTLPDGTHELIVHKCEENTNLQDTTRYLKLPFSKGIFLGNNNQAMKATKESFCITSFLCSTKLTQNGDMLDLLKWRTHPDKITGCLSKLKEIDGSEIVKFLQDTLDTLFGILDENSQKYGSKVFDSLVHIINLLQDSKFHHFKPVMDTYIESHFAGALAYRDLIKVLKWYVDRITEAERQEHIQEVLKAQEYIFKYIVQSRRLFSLATGGQNEEEFRCCIQELLMSVRFFLSQESKGSGALSQSQAVFLSSFPAVYSELLKLFDVREVANLVQDTLGSLPTILHVDDSLQAIKLQCIGKTVESQLYTNPGRVSLLEEIVPLKSHFVYFVAIGQQMQLKTKH

SEQ ID NO: 3405 - protein, 379 aa, Homo sapiens [sequence omitted]

SEQ ID NO: 3406 - protein, 432 aa, Homo sapiens
MVSISRPRDPPALASQSAGITGVSLRARPPPRPAGYVFRKEFPVCAGAATRARCPGPCSGTWVGALSVPTPWSQPRVSLGRNIARRGLWVPSALAQGPPAASEGCLPEGGAFPKGPPQQALGSSLPGGVARSSPWASGPRGVRATVYFWDENQSFPGRSRRFLGVRQAARAVLLHSADRVSPGLAAGTVFTTVEDLGSKILLTCSLNDSATEVTGHRWLKGGVVLKEDALPGQKTEFKVDSDDQWGEYSCVFLPEPMGTANIQLHGPPRVKAVKSSEHINEGETAMLVCKSESVPPVTDWAWYKITDSEDKALMNGSESRFFVSSSQGRSELHIENLNMEADPGQYRCNGTSSKGSDQAIITLRVRSHLAALWPFLGIVAEVLVLVTIIFIYEKRRKPEDVLDDDDAGSAPLKSSGQHQNDKGKNVRQRNSS

SEQ ID NO: 3407 - protein, 160 aa, Homo sapiens
MRTAAGAVSPDSRPETRRQTRKNEEAAWGPRVCRAEREDNRKCPPSILKRSRPEHHRPEAKPQRTSRRVWFREPPAVTVHYIADKNATATVRVPGRPRPHGGSLLLQLCVCVLLVLALGLYCGRAKPVATALEDLRARLLGLVLHLRHVALTCWRGLLRL

SEQ ID NO: 3408 - protein, 681 aa, Homo sapiens [sequence omitted]

SEQ ID NO: 3409 - protein, 161 aa, Homo sapiens
MPRAGRAPAEGGPAPGTRSSRCLRPRPLAWRRLVPNFGAWAPRKGAARVGRPVLSPRTSGAAGEPTCGAGSPGTLEEGVASGRTRRRTQSAGEVAKCRWGLGQEPLCPRGAVLLNSFSPPAWPQFPPALRLRALAWPQPRGPACGSTAQWPPRGDPTWRIS

SEQ ID NO: 3410 - protein, 295 aa, Homo sapiens [sequence omitted]

SEQ ID NO: 3411 - protein, 660 aa, Homo sapiens [sequence omitted]

SEQ ID NO: 3412 - protein, 101 aa, Homo sapiens
MNRMLAFQGKNPNSSHVAAEKRKDTLSPVIQVVCGKPTEFRQMLQTCMTSAMKQGSHFWSPRSTDINHNVLRNTDGYILPQFVIWSPLTNLWGLQSIKVLI

SEQ ID NO: 3413 - protein, 123 aa, Homo sapiens
MTLKTCLCTSDKSRCTTPGHLQKATGLLVSQMITTLASYCCCNKFEPRGFIILLFCRSEALKEGDGRVGSSQKLWEESGPCLFQILETSLIFCLVIPSSHFRARRHNLCFCYLSFTLTLLPSS

SEQ ID NO: 3414 - protein, 189 aa, Homo sapiens
MLLGQLSTLLCLLSGALPTGSGRPEPQSPRPQSWAAANQTWALGPGALPPLVPASALGSWKAFLGLQKARQLGMGRLQRGQDEVAAVTLPLNPQEVIQGMCKAVPFVQVFSRPGCSAIRLRNHLCFGHCSSLYIPGSDPTPLVLCNSCMPARKRWAPVVLWCLTGSSASRRRVKISTMLIEGCHCSPKA

SEQ ID NO: 3415 - protein, 164 aa, Homo sapiens
MPSLAPDCPLLAMPEETQEDSVAPMMPSQRSRGPLAPNHVHEVCLHQVESISDLHSGAGTLRPYLTEEARPWDELLGVLPPSLCAQAGCSPVYRRGGFLLLLALLVLTCLVLALLAVYLSVLQSESLRILAHTLRTQEETLLKLRLASLSQLRRLNSSEAQAPS

SEQ ID NO: 3416 - protein, 602 aa, Homo sapiens [sequence omitted]

SEQ ID NO: 3417 - protein, 353 aa, Homo sapiens
MLGACFPHLSSGDVMVFGPGGLGQPVLHPVLVLGHHQQPVLGFGSKLVVGPVVGPQACLGVQFALSAVLALPLPLEGGRRRGFGLGGLQPRVAEDLIDVEPLADVGLQHAVDEVLALAGQVLGAREVHTVLLLDTQHLPDVGVVIGHGAADHDVQDHAQAPDVIHLGLVGDALQHLGGCICCRPAEGLAEDDAPIAVPQAALGEAKVRQLDVEVLVEEKVLALEVPVDDVQVVAVLDGGGELSEHLACHVLMQGSLALDELEEVALDAKLHDDVDPSVRGLKDLVSLDDGAVVDSCQDVHLPRKESLHKVSRCFLAVDDLDSHIELEALRVGRFDFCVGTLAKIDAYDVTLLP

SEQ ID NO: 3418 - protein, 199 aa, Homo sapiens
MKDFLEKRDKGKLLIQRSRRLKQNLLRPMQLSVTEDGYIHYGDKVMLVNPDDPDTEADVFLRGDLSLCMTPDEIQSHLKDELEVPCGLSAVQAKTPIGRNTFIILSVHRDATGQVLRYGQDFCLGITGGFDNKMLYLSSDHRTLLKSSKRSWLQEVYLTDEVSHVNCWNMKASPSRQMLKFSSITVTQIGDWQPTGIFS

SEQ ID NO: 3419 - protein, 111 aa, Homo sapiens [sequence omitted]

SEQ ID NO: 3420 - protein, 336 aa, Homo sapiens [sequence omitted]

SEQ ID NO: 3421 - protein, 111 aa, Homo sapiens
MVLVAWPVQPSKYYLIERSLELKKMSCRNLLIKNCKLYVFLRDRVLLYCPGWRAVVPLWLTATPTFQFQEILVPQPQAAGTTGAHQLIFCIFSRHGVSPCWPGWSQTPSLK

SEQ ID NO: 3422 - protein, 377 aa, Homo sapiens
MNGPVSPKSKARPSSPSTSWHRPASPCPSPGPGHTLPPKPPSPRGTTASPKGRVRRKEEAKESPSAAGPEDKSQSKRRASNEKESAAPASPAPSPAPSPTPAPPQKEQPPAETPTAPAPPVTPSKPMAGTTDREEATRLLAEKRRQAREQREREEQERRLQAERDKRMREEQLAREAEARAEREAEARRREEQEAREKAQAEQEEQERLQKQKEEAEARSREEAERQRLEREKHFQQQEQERQERRKRLEEIMKRTRKSEVSETKKQDSKEANANGSSPEPVKAVEARSPGLQKEAVQKEEPIPQEPQWSLPSKELPASLVNGLQPLPARQENGFSTNGPSGDKSLSRTPETLLPFAEAEAFLKKAVVQSPQVTEVL

SEQ ID NO: 3423 - protein, 394 aa, Homo sapiens
MEGSHQGAPESPDSLQRNQKELQGLLNQVQALEKEAASSVDVQALRRLFEAVPQLGGAAPQAPAAHQKPEASVEQAFGELTRVSTEVAQLKEQTLARLLDIEEAVHKALSSMSSLQPEASARGHFQGPPKDHSAHKISVTVSSSARPSGSGQEVGGQTAVKNQAKVECHTEAQSQVKIRNHTEARGHTASTAPSTRRQETSREYLCPPRVLPSSRDSPSSPTFISIQSATRKPLETPSFKGNPDVSVKSTQLAQDIGQALLHQKGVQDKTGKKDITQCSVQPEPAPPSASPLPRGWQKSVLELQTGPGSSQHYGAMRTVTEQYEEVDQFGNTVLMSSTTVTEQAEPPRNPGSHLGLHASPLLRQFLHSPAGFSSDLTEAETVQVSCSYSQPAAQ

SEQ ID NO: 3424 - protein, 457 aa, Homo sapiens
MDNVSILSSQPEGSLQSWLSCTLSLATDTMRTPSRQSATSSRILSPRINEEAGDTERTQSALALSRARSTNVHSKTSGDKPVSPHFVRRQKYCHFGDGEVLAVQRKSTERLEPASSPLASRSTNTSPLSREKLPSPSAALSEFVEGLRRKRAQRGQGSTLGLEDWPTLPIYQTTGASTLRRGRAGSDEGNLSLRVGAKSPLEIEGAAGGLLRSTSLKCISSDGVGGTTLLPEKSKTQFSSCESLLESRPSMGRKLSSPTTPRDMLLSPTLRPRRRCLESSVDDAGCPDLGKEPLVFQNRQFAHLMEEPLGSDPFSWKLPSLDYERKTKVDFDDFLPAIRKPQTPTSLAGSAKGGQDGSQRSSIHFETEEANRSFLSGIKTILKKSPEPKEDPAHLSDSSSSSGSIVSFKSADSIKSRPGIPRLAGDGGERTSPERREPGTGRKDDDVASIMKKYLQK

SEQ ID NO: 3425 - protein, 639 aa, Homo sapiens
MALPRLGTQSTGPGRCLSPNLQAQEAPAPVTTSSSTSTLSSSPWSAQPTWKSDPGFRITVVTWNVGTAMPPDDVTSLLHLGGGDDSDGADMIAIGLQEVNSMLNKRLKDALFTDQWSELFMDALGPFNFVLVSSVRMQGVILLLFAKYYHLPFLRDVQTDCTRTGLGGYWGNKGGVSVRLAAFGHMLCFLNCHLPAHMDKAEQRKDNFQTILSLQQFQGPGAQGILDHDLVFWFGDLNFRIESYDLHFVKFAIDSDQLHQLWEKDQLNMAKNTWPILKGFQEGPLNFAPTFKFDVGTNKYDTSAKKRKPAWTDRILWKVKAPGGGPSPSGRKSHRLQVTQHSYRSHMEYTVSDHKPVAAQFLLQFAFRDDMPLVRLEVADEWVRPEQAVVRYRMETVFARSSWDWIGLYRVGFRHCKDYVAYVWAKHEDVDGNTYQVTFSEESLPKGHGDFILGYYSHNHSILIGITEPFQISLPSSELASSSTDSSGTSSEGEDDSTLELLAPKSRSPSPGKSKRHRSRSPGLARFPGLALRPSSRERRGASRSPSPQSRRLSRVAPDRSSNGSSRGSSEEGPSGLPGPWAFPPAVPRSLGLLPALRLETVDPGGGGSWGPDREALAPNSLSPSPQGHRGLEEGGLGP

SEQ ID NO: 3426 - protein, 184 aa, Homo sapiens
MDEGPPHPALPRAARGRGGRRGQRLPGSPTLPSLSFSSAILLRSRSPGRCLTITSAAVSGPAQRPAASLAWRGGGAALNPGGGRPLGGAGRGGGSERALSPLRATTLALGEDQRPRLPPGPRPCPSRPEAGAGLVPGLACCFITRSPTPPFPYFSSIWGQHARAHTPRPLLSCLCDVALLDFCC

SEQ ID NO: 3427 - protein, 203 aa, Homo sapiens
MHELSNDGARRQFEFYLEEMILPLMVASAQSGERECHIVVLTDDDVVDWDEEYPPQMGEEYSQIIYSTKLYRFFKYIENRDVAKSVLKERGLKKIRLGIEGYPTYKEKVKKRPGGRPEVIYNYVQRPFIRMSWEKEEGKSRHVDFQCVKSKSITNLAAAAADIPQDQLVVMHPTPQVDELDILPIHPPSGNSDLDPDAQNPML

SEQ ID NO: 3428 - protein, 136 aa, Homo sapiens
MASKGPSASASPENSSAGGPSGSSNGAGESGGQDSTFECNICLDTAKDAVISLCGHLFCWPCLHQGFQGFGFGDGGFQMSFGIGAFPFGIFATAFNINDGRPPPAVPGTPQYVDEQFLSRLFLFVALVIMFWLLIA

SEQ ID NO: 3429 - protein, 120 aa, Homo sapiens [sequence omitted]

SEQ ID NO: 3430 - protein, 102 aa, Homo sapiens
MNDCPSYRIPQYYYWVMSVSPSHGIPEHCYEGLNVCPAHRTPQHSCCVLNVFSSKRIPEKCYAGLHVCPTRRTPEHPGCSLNDCPSHRIAEHCFWVEHFSLT

SEQ ID NO: 3431 - protein, 173 aa, Homo sapiens [sequence omitted]

SEQ ID NO: 3432 - protein, 152 aa, Homo sapiens
MSVPGPYQAATGPSSAPSAPPSYEETVAVNSYYPTPPAPMPGPTTGLVTGPDGKGMNPPSYYTQPAPIPNNNPITVQTVYVQHPITFLDRPIQMCCPSCNKMIVSQLSYNAGALTWLSCGSLCLLGQECSGTIVALRSFDLLGSCNPPSSAS

SEQ ID NO: 3433 - protein, 626 aa, Homo sapiens
MVERACEIKDNSQCGGPFTQTQDSIVNEKIPGVDPWESSECTDVLMGRSSLNCYIRVDSEHKPYEYQEYGEKPYTHTQCGTAFSYQPCFQIHERPQHGKKLYDCKECASFSSLENLQRHMAAHHGDGPRICKLCGNAFIWPSLFHMLRRTHTEEKPYEYEQCSTAFPAYSSTLRHERTHSGEKPYQCKQCGKAFSCSCYTQLYERTHTGEQSYECKQCGKAFYHLGSFQRHMIVHTGDGPHKCKICGKGFLSPSSVRRHKRTHTGEKPYECKYCGKAFSDCTGFRRHMITHTGDGPHKCKVCGKAFDSPSLCRRHETAHTGEKPYKCECGKAFSDFYYFRNHETTHTGEKPYKCKQCGKAFICCTYLQIHERIHTGERPYKCKQCGKAFRSSNYIRVHEKTHTGEKPYECKQCGKALSHLKSFQRHMIMHTGDGPHKCKICGKSFDSPSSFRRHERIHTGERPYKCKLCGKGFRSSSYIQLHERTHTGEKPYGCQQCGKALSDLSSFRRHMITHTGNGPHKCKICGKGFDYPSSVQRHERTHTGEKPYECKECGKAFSHSSYLRIHERVHTGEKPYKCKECGKPFHCPSAFHKHERTHSMEKPYKCKECGEAFHCISSFHKHEMTH

SEQ ID NO: 3434 - protein, 203 aa, Homo sapiens [sequence omitted]

SEQ ID NO: 3435 - protein, 233 aa, Homo sapiens [sequence omitted]

SEQ ID NO: 3436 - protein, 146 aa, Homo sapiens
MNSKGQYPTQPTYPVQPPGNPVYPQTLHLPQAPPYTDAPPAYSELYRPSFVHPGAATVPTMSATIPMAYYPVGPIYPPGSTVLVEGGYDAGARFGAGATAGNIPPPPPGCPPNAAQLAVMQGANVLVTQRKGNFFMGGSDGGYTIW

SEQ ID NO: 3437 - protein, 130 aa, Homo sapiens [sequence omitted]

SEQ ID NO: 3438 - protein, 420 aa, Homo sapiens
METLSSEESCDSFDSLESGKQQDVRFHSKYFTEELRRIFIEDTDSETEDFAGFTQSDLNGKTNPEVMVVESDLSDDGKASLVSEEEEDEEEDKATPRRSRSRRSSIGLRVAFQFPTKKLANKPDKNSSSEQLFSSARLQNEKKTILERKKDCRQVIQREDSTSESEDDSRDESQESSDALLKRTMNIKENKAMLAQLLAELNSMPDFFPVRTPTSASRKKTVRRAFSEGQITRRMNPTRSARPPEKFALENFTVSAAKFAEEFYSFRRRKTIGGKCREYRRRHRISSFRPVEDITEEDLENVAITVRDKIYDKVLGNTCHQCRQKTIDTKTVCRNQGCCGVRGQFCGPCLRNRYGEDVRSALLDPDWVCPPCRGICNCSYCRKRDGRCATGILIHLAKFYGYDNVKEYLESLQKELVEDN

SEQ ID NO: 3439 - protein, 433 aa, Homo sapiens
MIRCAATGSAVLLHSGSSVPAAAGSSVVSESAVSWEAGARAVLRCQSPRMVWTQDRLHDRQRVLHWDLRGPGGGPARRLLDLYSAGEQRVYEARDRGRLELSASAFDDGNFSLLIRAVEETDAGLYTCNLHHHYCHLYESLAVRLEVTDGPPATPAYWDGEKEVLAVARGAPALLTCVNRGHVWTDRHVEEAQQVVHWDRQPPGVPHDRADRLLDLYASGERRAYGPLFLRDRVAVGADAFERGDFSLRIEPLEVADEGTYSCHLHHHYCGLHERRVFHLTVAEPHAEPPPRGSPGNGSSHSGAPGPDPTLARGHNVINVIVPESRAHFFQQLGYVLATLLLFILLLVTVLLAARRRRGGYEYSDQKSGKSKGKDVNLAEFAVAAGDQMLYRSEDIQLDYKNNILKERAELAHSPLPAKYIDLDKGFRKENCK

SEQ ID NO: 3440 - protein, 648 aa, Homo sapiens [sequence omitted]

SEQ ID NO: 3441 - protein, 114 aa, Homo sapiens
MSRTAYTVGALHVTERKYLKRDWCKTQPLKQTIHEEGCNSRTIINRFCYGQCNSFYIPRHIRKEEGSFQSCSFCKPKKFTTMMVTLNCPELQPPTKKKRVTRVKQCRCISIDLD

SEQ ID NO: 3442 - protein, 524 aa, Homo sapiens [sequence omitted]

SEQ ID NO: 3443 - protein, 189 aa, Homo sapiens [sequence omitted]

SEQ ID NO: 3444 - protein, 137 aa, Homo sapiens
MSVKKAPPPTRPKRNDSTRLTQAEISEQPTIATVVPQVPTSPKSSLSVQPGFLADLNRTLQRKSITRHGSLSSRMSRAEPTATMDDMALPPPPPELLSDQQKAGYGGSHISGYATLRRGPPPAPPKRDQNTKLSRDW

SEQ ID NO: 3445 - protein, 109 aa, Homo sapiens [sequence omitted]

SEQ ID NO: 3446 - protein, 624 aa, Homo sapiens
MDRGQVLEQLLPELTGLLSLLDHEYLSDTTLEKKMAVASILQSLQPLPAKEVSYLYVNTADLHSGPSFVESLFEEFDCDLSDLQDMPEDDGEPSKGASPELAKSPCLRNAADLPPPLPNKPPPEDYYEEALPLGPGKSPEYISSHNGCSPSHSIVDGYYEDADSSYPATRVNGELKSSYNDSDAMSSSYESYDEEEEEGKSPQPRHQWPSEEASMHLVRECRICAFLLRKKRFGQWAKQLTVIREDQLLCYKSSKDRQPHLRLALDTCSIIYVPKDSRHKRHELRFTQGATEVLVLALQSREQAEEWLKVIREVSKPVGGAEGVGVPRSPVLLCKLDLDKRLSQEKQTSDSDSVGVGDNCSTLGRRETCDHGKGKKSSLAELKGSMSRAAGRKITRIIGFSKKKTLADDLQTSSTEEEVPCCGYLNVLVNQGWKERWCRLKCNTLYFHKDHMDLRTHVNAIALQGCEVAPGFGPRHPFAFRILRNRQEVAILEASCSEDMGRWLGLLLVEMGSRVTPEALHYDYVDVETLTSIVSAGRNSFLYARSCQNQWPEPRVYDDVPYEKMQDEEPERPTGAQVKRHASSCSEKSHRVDPQVKVKRHASSANQYKYGKNRAEEDARRYLV

SEQ ID NO: 3447 - protein, 107 aa, Homo sapiens [sequence omitted]

SEQ ID NO: 3448 - protein, 166 aa, Homo sapiens
MSTVGLFHFPTPLTRICPAPWGLRLWEKLTLLSPGIAVTPVQMAGKKDYPALLSLDENELEEQFVKGHGPGGQATNKTSNCVVLKHIPSGIVVKCHQTRSVDQNRKLARKILQEKVDVFYNGENSPVHKEKREAAKKKQERKKRAKETLEKKKLLKELWESSKKVH

SEQ ID NO: 3449 - protein, 317 aa, Homo sapiens [sequence omitted]

SEQ ID NO: 3450 - protein, 709 aa, Homo sapiens [sequence omitted]

SEQ ID NO: 3451 - protein, 151 aa, Homo sapiens
MCRKFTMTMQRHCTESSPLILRSPEHSLHNFVDLFCQLKPGTLLAGFLCSFWALQSFCTYMLQLQSQEDAEFFSPRSIFLRKPNCLGSCHNSVSVSVDYGWAYCPSVWWWGKSSQREAGVTGTVVSNARQTSGVVTTTSVHSEHILAGKLG

SEQ ID NO: 3452 - protein, 380 aa, Homo sapiens [sequence omitted]

SEQ ID NO: 3453 - protein, 523 aa, Homo sapiens
MAALLRRLLQRERPSAASGRPVGRREANLGTDAGVAVRVRFAPSPTGFLHLGGLRTALYNYIFAKKYQGSFILRLEDTDQTRVVPGAAENIEDMLEWAGIPPDESPRRGGPAGPYQQSQRLELYAQATEALLKTGAAYPCFCSPQRLELLKKEALRNHQTPRYDNRCRNMSQEQVAQKLAKDPKPAIRFRLEQVVPAFQDLVYGWNRHEVASVEGDPVIMKSDGFPTYHLACVVDDHHMGISHVLRGSEWLVSTAKHLLLYQALGWQPPHFAHLPLLLNRDGSKLSKRQGDVFLEHFAADGFLPDSLLDIITNCGSGFAENQMGRTLPELITQFNLTQVTCHSALLDLEKLPEFNRLHLQRLVSNESQRRQLVGKLQVLVEEAFGCQLQNRDVLNPVYVERILLLRQGHICRLQDLVSPVYSYLWTRPAVGRAQLDAISEKVDVIAKRVLGLLERSGMSLTQDMLNGELKKLSEGLEGTKYSNVMKLLRMALSGQQQGPPVAEMMLALGPKEVRERIQKVVSS

SEQ ID NO: 3454 - protein, 599 aa, Homo sapiens
MPSSLPGSQVPHPTLDAVDLVEKTLRNEGTSSSAPVLEEGDTDPWTLPQLKDTSQPWKELRVAGRLRRVAGSVLKACGLLGSLYFFICSLDVLSSAFQLLGSKVAGDIFKDNVVLSNPVAGLVIGVLVTALVQSSSTSSSIVVSMVAAKLLTVRVSVPIIMGVNVGTSITSTLVSMAQSGDRDEFQRAFSGSAVHGIFNWLTVLVLLPLESATALLERLSELALGAASLTPRAQAPDILKVLTKPLTHLIVQLDSDMIMSSATGNATNSSLIKHWCGTTGQPTQENSSCGAFGPCTEKNSTAPADRLPCRHLFAGTELTDLAVGCILLAGSLLVLCGCLVLIVKLLNSVLRGRVAQVVRTVINADFPFPLGWLGGYLAVLAGAGLTFALQSSSVFTAAVVPLMGVGVISLDRAYPLLLGSNIGTTTTALLAALASPADRMLSALQVALIHFFFNLAGILLWYLVPALRLPIPLARHFGVVTARYRWVAGVYLLLGFLLLPLAAFGLSLAGGMVLAAVGGPLVGLVLLVILVTVLQRRRPAWLPVRLRSWAWLPVWLHSLEPWDRLVTRCCPCNVCSPPKATTKEAYCYENPEILASQQL

SEQ ID NO: 3455 - protein, 221 aa, Homo sapiens
MESSRWDKDPPGERRPQQSQHWRARDHGARGCGPRQPTATASPRPGLWITPAHGSHTPQTNTRRTQADNIFIYESWLIHHGTQMSSVLPQPPLVRGPWHNTNSPWDSWASRGKLRVCPCRTPRLHSSGCFSSKAGTALSPSLPVPGLRPQPPFLQKPLSILAPATPPALVSPTPPKLSPGQLSPHSVNVHWGPQGHLHLPRSGTTVLHAYLQTLSSPASHQ

SEQ ID NO: 3456 - protein, 107 aa, Homo sapiens
MAESLRSPRRSLYKLVGSPPWKEAFRQRCLERMRNSRDRLLNRYRQAGSSGPGNSQNSFLVQEVMEEEWNALQSVENCPEDLAQLEELIDMAVLEEIQQELINQGTT

SEQ ID NO: 3457 - protein, 462 aa, Homo sapiens
MGQDAFMEPFGDTLGVFQCKIYLLLFGACSGLKVTVPSHTVHGVRGQALYLPVHYGFHTPASDIQIIWLFERPHTMPKYLLGSVNKSVVPDLEYQHKFTMMPPNASLLINPLQFPDEGNYIVKVNIQGNGTLSASQKIQVTVDDPVTKPVVQIHPPSGAVEYVGNMTLTCHVEGGTRLAYQWLKNGRPVHTSSTYSFSPQNNTLHIAPVTKEDIGNYSCLVRNPVSEMESDIIMPIIYYGPYGLQVNSDKGLKVGEVFTVDLGEAILFDCSADSHPPNTYSWIRRTDNTTYIIKHGPRLEVASEKVAQKTMDYVCCAYNNITGRQDETHFTVIITSVGLEKLAQKGKSLSPLASITGISLFLIISMCLLFLWKKYQPYKVIKQKLEGRPETEYRKAQTFSGHEDALDDFGIYEFVAFPDVSGVSRIPSRSVPASDCVSGQDLHSTVYEVIQHIPAQQQDHPE

SEQ ID NO: 3458 - protein, 620 aa, Homo sapiens
MAPGPPSVFPPEPEEPEADQHQPFLFRHASYSSTTSDCETDGYLSSSGFLDASDPALQPPGGVPSSLAESHLCLPSAFALSIPRSGPGSDFSPGDSYASDAASGLSDVGEGMGQMRRPPGRNLRRRPRSRLRVTSVSDQNDRVVECQLQTHNSKMVTFRFDLDGDSPEEIAAAMVYNEFILPSERDGFLRRIREIIQRVETLLKRDTGPMEAAEDTLSPQEEPAPLPALPVPLPDPSNEELQSSTSLEHRSWTAFSTSSSSPGTPLSPGNPFSPGTPISPGPIFPITSPPCHPSPSPFSPISSQVSSNPSPHPTSSPLPFSSSTPEFPVPLSQCPWSSLPTTSPPTFSPTCSQVTLSSPFFPPCPSTSSFPSTTAAPLLSLASAFSLAVMTVAQSLLSPSPGLLSQSPPAPPSPLPSLPLPPPVAPGGQESPSPHTAEVESEASPPPARPLPGEARLAPISEEGKPQLVGRFQVTSSKEPAEPLPLQPTSPTLSGSPKPSTPQLTSESSDTEDSAGGGPETREALAESDRAAEGLGAGVEEEGDDGKEPQVGGSPQPLSHPSPVWMNYSYSSLCLSSEESESSGEDEEFWAELQSLRQKPFHALRASSGTCQRWKHYRHY

SEQ ID NO: 3459 - protein, 885 aa, Homo sapiens
MAARDSDSEEDLVSYGTGLEPLEEGERPKKPIPLQDQTVRDEKGRYKRFHGAFSGGFSAGYFNTVGSKEGWTPSTFVSSRQNRADKSVLGPEDFMDEEDLSEFGIAPKAIVTTDDFASKTKDRIREKARQLAAATAPIPGATLLDDLITPAKLSVGFELLRKMGWKEGQGVGPRVKRRPRRQKPDPGVKIYGCALPPGSSEGSEGEDDDYLPDNVTFAPKDVTPVDFTPKDNVHGLAYKGLDPHQALFGTSGEHFNLFSGGSERAGDLGEIGLNKGRKLGISGQAFGVGALEEEDDDIYATETLSKYDTVLKDEEPGDGLYGWTAPRQYKNQKESEKDLRYVGKILDGFSLASKPLSSKKIYPPPELPRDYRPVHYFRPMVAATSENSHLLQVLSESAGKATPDPGTHSKHQLNASKRAELLGETPIQGSATSVLEFLSQKDKERIKEMKQATDLKAAQLKARSLAQNAQSSRAQLSPAAAAGHCSWNMALGGGTATLKASNFKPFAKDPEKQKRYDEFLVHMKQGQKDALERCLDPSMTEWERGRERDEFARAALLYASSHSTLSSRFTHAKEEDDSDQVEVPRDQENDVGDKQSAVKMKMFGKLTRDTFEWHPDKLLCKRFNVPDPYPDSTLVGLPRVKRDKYSVFNFLTLPETASLPTTQASSEKVSQHRGPDKSRKPSRWDTSKHEKKEDSISEFLSLARSKAEPPKQQSSPLVNKEEEHAPELSANQTVNKDVDAQAEGEGSRPSMDLFRAIFASSSDEKSSSSEDEQGDSEDDQAGSGEANFQSSQDTDLGETSSVAHALVPAPQEPPPSFPIQKMQIDEREEFGPRLPPVFCPNARQTLEVPQKEKHKKNKDKHKAKKEHRRKKEKKKKHRKHKHKGK

SEQ ID NO: 3460 - protein, 156 aa, Homo sapiens
MKVILCLEPGATRMHKPPLQTASVHTLQGRRATGCKGRHRFLQQQWAMGTERGHGDAVVALGPHPALASVHGLLLKAFSDLEVDLSGAHRGGCLDVELIPVLADLHVRLGRSRYGHFPQHGVHTCAGCTTGLGHGASPPVSGPVGHWSYPNFRKGP

SEQ ID NO: 3461 - protein, 178 aa, Homo sapiens [sequence omitted]

SEQ ID NO: 3462 - protein, 134 aa, Homo sapiens
MSLCFLRKFSKIVCCVPGHSRYSRNGGYEFYHNSLLLGEQLFARLKFGRGTGFPLVLAASTRRVSLQPVSELFGNSTDPCPSVQTMPQGPPAFKLGLFSFPPLLSFQLYGQYMQFSHSFSHLTSNSFMISPFYR

SEQ ID NO: 3463 - protein, 504 aa, Homo sapiens
MERSQCGSRDRGVSGRPHLAPGLVVAAPPPPSPALPVPSGMQVPPAFLRPPSLFLRAAAAAAAAAAATSGSGGCPPAPGLESGVGAVGCGYPRTPKCARCRNHGVVSALKGHKRFCRWRDCACAKCTLIAERQRVMAAQVALRRQQAQEESEARGLQRLLCSGLSWPPGGRASGGGGRAENPQSTGGPAAGAALGLGALRQASGSATPAFEFFQQDYPEEKQEQKESKCESCQNGQEELISKSHQLYLGSSSRSNGVIGKQSIGSSISEYSNKPDSILSPHPGEQSGGEESPRSLSSSDLESGNESEWVKDLTSTKASLPTVSSRPRDPLDILTKIFPNYRRSRLEGILRFCKGDVVQAIEQVLNGKEHKPDNRNLANSEELENTAFQRASSFSLAGIGFGTLGNKSAFSPLQTTSASYGGDSSLYGVNPRVGISPLRLAYSSAGRGLSGFMSPYLTPGLVPTLPFRPALDYAFSGMIRDSSYLSSKDSITCGRLYFRPNQDNP

SEQ ID NO: 3464 - protein, 198 aa, Homo sapiens [sequence omitted]

SEQ ID NO: 3465 - protein, 104 aa, Homo sapiens
MKLNDWFSVNTASERQRWNLNAHLSDSTSCSFHMASKLCCPTSHFWEVATPSFHPLFWILTRDSTLPQLSKPAAAAKKPQHRHTLDLHHVLMSQMLYQAFDSLT

SEQ ID NO: 3466 - protein, 476 aa, Homo sapiens [sequence omitted]

SEQ ID NO: 3467 - protein, 318 aa, Homo sapiens
MCRTALGVTTLQDLGVCWRKEHDPAEMLRVGRAELGGWKPSWEAIVKEVAAATGHTVVLVDQTEDILAKSKKGIEESLRKVAKKKFAENPKAGDEFVEKTLSTIATSTDAASVVHSTDLVVEAIVENLKVKNELFKRLDKFAAEHTIFASNTSSLQITSIANATTRQDRFAGLHFFNPVPVMKLVEVIKTPMTSQKTFESLVDFSKALGKHPVSCKDTPGFIVNRLLVPYLMEAIRLYERGDASKEDIDTAMKLGAGYPMGPFELLDYVGLDTTKFIVDGWHEMDAENPLHQPSPSLNKLVAENKFGKKTGEGFYKYK

SEQ ID NO: 3468 - protein, 667 aa, Homo sapiens
MATALLAGEKLRELILPGAQDDKAGALAALLLQLKLELPFDRVVTIGTVLVPILLVTLVFTKNFAEEPIYCYTPHNFTRDQALYARGYCWTELRDALPGVDASLWPSLFEHKFLPYALLAFAAIMYVPALGWEFLASTRLTSELNFLLQEIDNCYHRAAEGRAPKIEKQIQSKGPGITEREKREIIENAEKEKSPEQNLFEKYLERRGRSNFLAKLYLARHVLILLLSAVPISYLCTYYATQKQNEFTCALGASPDGAAGAGPAVRVSCKLPSVQLQRIIAGVDIVLLCVMNLIILVNLIHLFIFRKSNFIFDKLHKVGIKTRRQWRRSQFCDINILAMFCNENRDHIKSLNRLDFITNESDLMYDNVVRQLLAALAQSNHDATPTVRDSGVQTVDPSANPAEPDGAAEPPVVKRPRKKMKWIPTSNPLPQPFKEPLAIMRVENSKAEKPKPARRKTATDTLIAPLLDRSAHHYKGGGGDPGPGPAPAPAPPPAPDKKHARHFSLDVHPYILGTKKAKAEAVPAALPASRSQEGGFLSQAEDCGLGLAPAPIKDAPLPEKEIPYPTEPARAGLPSGGPFHVRSPPAAPAVAPLTPASLGKAEPLTILSRNATHPLLHINTLYEAREEEDGGPRLPQDVGDLIAIPAPQQILIATFDEPRTVVSTVEF

SEQ ID NO: 3469 - protein, 110 aa, Homo sapiens [sequence omitted]

SEQ ID NO: 3470 - protein, 721 aa, Homo sapiens
MLPRGRPRALGAAALLLLLLLLGFLLFGGDLGCERREPGGRAGAPGCFPGPLMPRVPPDGRLRRAAALDGDPGAGPGDHNRSDCGPQPPPPPKCELLHVAIVCAGHNSSRDVITLVKSMLFYRKNPLHLHLVTDAVARNILETLFHTWMVPAVRVSFYHADQLKPRVSWIPNKHYSGLYGLMKLVLPSALPAELARVIVLDTDVTFASDISELWALFAHFSDTQAIGLVENQSDWYLGNLWKNHRPWPALGRGFNTGVILLRLDRLRQAGWEQMWRLTARRELLSLPATSLADQDIFNAVIKEHPGLVQRLPCVWNVQLSDHTLAERCYSEASDLKVIHWNSPKKLRVKNKHVEFFRNFYLTFLEYDGNLLRRELFVCPSQPPPGAEQLQQALAQLDEEDPCFEFRQQQLTVHRVHVTFLPHEPPPPRPHDVTLVAQLSMDRLQMLEALCRHWPGPMSLALYLTDAEAQQFLHFVEASPVLAARQDVAYHVVYREGPLYPVNQLRNVALAQALTPYVFLSDIDFLPAYSLYDYLRASIEQLGLGSRRKAALVVPAFETLRYRFSFPHSKVELLALLDAGTLYTFRYHEWPRGHAPTDYARWREAQAPYRVQWAANYEPYVVVPRDCPRYDPRFVGFGWNKVAHIVELDAQEYELLVLPEAFTIHLPHAPSLDISRFRSSPTYRDCLQALKDEFHQDLSRHHGAAALKYLPALQQPQSPARG

SEQ ID NO: 3471 - protein, 268 aa, Homo sapiens
MFSKSDPLCVMYTQGMENKQWREFGRTEVIDNTLNPDFVRKFIVDYFFEEKQNLRFDLYDVDSKSPDLSKHDFLGQAFCTLGEIVGSPGSRLEKPLTIGAFSLNSRTGKPMPAVSNGSGLWMESLRTTGLEASGGVPGKKCGTIILSAEELSNCRDVATMQFCANKLDKKDFFGKSDPFLVFYRSNEDGTFTICHKTEVMKNTLNPVWQTFSIPVRALCNGDYDRTIKVEVYDWDRDGSHDFIGEFTTSYRELARGQSQFNIYEVVNP

SEQ ID NO: 3472 - protein, 198 aa, Homo sapiens
MEKPAGRKKKTPTPREEADVQKSALREEKVSGDRKPPERPTVPRKPRTEPCLSPEDEEHVFDAFDASFKDDFEGVPVFIPFQRKKPYECSECGRIFKHKTDHIRHQRVHTGEKPFKCAQCGKAFRHSSDVTKHQRTHTGEKPFKCGECGKAFNCGSNLLKHQKTHTGEKPYECTHCGKAFAYSSCLIRHQKRHPRKKP

SEQ ID NO: 3473 - protein, 148 aa, Homo sapiens
MEVVTFGDVAVHFSREEWQCLDPGQRALYREVMLENHSSVAGLAGFLVFKPELISRLEQGEEPWVLDLQGAEGTEAPRTSKTGFLGRPTMGQEPRHPHAPPATPVPGLPKHCSQRLTLPPPGLSSSPLGHFLVHDQDRRRGTSAIWMV

SEQ ID NO: 3474 - protein, 162 aa, Homo sapiens
MSRSGTDPQQRQQASEADAAAATFRANDHQHIRYNPLQDEWVLVSAHRMKRPWQGQVEPQLLKTVPRHDPLNPLCPGAIRANGEIFENKGAMMGCSNPHPHCQVWASSFLPDIAQREERSQQAYKSQHGEPLLMEYSRQELLRKVGESQALCPQGVPNFLIP

SEQ ID NO: 3475 - protein, 350 aa, Homo sapiens
MLEGAELYFNVDHGYLEGLVRGCKASLLTQQDYINLVQCETLEDLKIHLQTTDYGNFLANHTNPLTVSKIDTEMRKRLCGEFEYFRNHSLEPLSTFLTYMTCSYMIDNVILLMNGALQKKSVKEILGKCHPLGRFTEMEAVNIAETPSDLFNAILIETPLAPFFQDCMSENALDELNIELLRNKLYKSYLEAFYKFCKNHGDVTAEVMCPILEFEADRRAFIITLNSFGTELSKEDRETLYPTFGKLYPEGLRLLAQAEDFDQMKNVADHYGVYKPLFEAVGGSGGKTLEDVFYEREVQMNVLAFNRQFHYGVFYAYVKLKEQEIRNIVWIAECISQRHRTKINSYIPIL

SEQ ID NO: 3476 - protein, 383 aa, Homo sapiens
MSARATRPRSRRGRHAPPGELDPVAESSEEVEAASGSSKPSFAPPPVSSGLEQLGPMEEVSGQGLGSRTDKKMDGGSGRELASAPEVPHKPAVEAHQAPEAALQYKETVPPGNGAPDVFQTLQHTLSSLEAAAAAWRHQPPSHSGPMEFEGTSEGGAGSLGKQEGAGSCQREAARLAERNAWLRLALSSREDELVRTQASLEAIRAEKETLQKEVQELQDSLLRLEPCPHLSHNQAGGSGSGSSSSEADREPWETQDSFSLAHPLLRRLRSHSSTQILGSLPNQPLSPEMHIMEAQMEQLRGSIEKLKCFNRLLSAVLQGYKGRCEGLSMQLGQREAEATALHLALQYRVLLCHPGWSAVVPSWLTATSASPVQVILLPQPPE

SEQ ID NO: 3477 - protein, 100 aa, Homo sapiens [sequence omitted]

SEQ ID NO: 3478 - protein, 311 aa, Homo sapiens
MHADTPSPMRLDRSVELKGDSGSAWGKRERASEGQTKPRWTTSQADQAQVDHVPGRPSPGGPRPRRTTSQADHVPGGPSPGGPRPRRTTSQADQAQVDHVPGGPRPRRTKPRWTTSQADHVPGRPRPRQTKPRRTTSQADHVPGGPSPGGPRPRQTKPRQTTSQVDLVVVYSLLPTPLGRNNCSWPHCTNEETEAQGGSRLPEAAALGLDCGCLLRKETVPPSTLILAGVGPPLLHQVSWSLRSVPGAGPVPQTSAETSHPPNSIEHHDRKSKGPKLGQGRWLVPVIPALWKAEAGGSFEVRSSRLVWPKW

SEQ ID NO: 3479 - protein, 115 aa, Homo sapiens [sequence omitted]

SEQ ID NO: 3480 - protein, 362 aa, Homo sapiens
MKYLTVGDLEDCLLNKVDLRRQQISQAVEEVQKVVHHLTTNISNQDIRFQAVPYSDTYNENIKVLAPSQFLVTVPIKGLAGYREAREQHWRYYTLQGTRLPCPLRDPEGLQQWLEVEQFMKSLWQWHETDVNIDGDIVPAKVLLVFRKLVENAVRTCHLSGKVSLLGNRSAVWVAVETSAYQVELELVPAVEIPTTWSKKARWPRCLQRWPSQERVECIKSFGFNLLACSNYHWQLSFLRAEQVLLEQLDEDGGCRRKCFQVMRHLKEDIWCPGNRPVITSHHLQTVLFWTCEKYPHFKDWQVFSKAFLRLVRKLHKCVSQHFLKHYFVRNSNLFQCANPTELDTVAQKLATFLKNPQIGPP

SEQ ID NO: 3481 - protein, 202 aa, Homo sapiens
MDPASGEGEGRGWGGRRRRRGLFFILASPFPPHLRAAAARRAGPGCGGESSGQASRPGPVPAPAPAPSPRRRRAPAAGLPLPSRLAAFSKHRRGSAAASGRAPSRAEDRRPSRASPARPALFAAPARRDVRLGRRIFGRVRAGVMLFAPPRVAPNAGYWVGGCGWKALRWRWAWPVARAGGAVARRAPSFSRRGRRPPRTSR

SEQ ID NO: 3482 - protein, 577 aa, Homo sapiens
MHWLRKVQGLCTLWGTQMSSRTLYINSRQLVSLQWGHQEVPAKFNFASDVLDHWADMEKAGKRLPSPALWWVNGKGKELMWNFRELSENSQQAANVLSGACGLQRGDRVAVVLPRVPEWWLVILGCIRAGLIFMPGTIQMKSTDILYRLQMSKAKAIVAGDEVIQEVDTVASECPSLRIKLLVSEKSCDGWLNFKKLLNEASTTHHCVETGSQEASAIYFTSGTSGLPKMAEHSYSSLGLKAKMDAGWTGLQASDIMWTISDTGWILNILCSLMEPWALGACTFVHLLPKFDPLVILKTLSSYPIKSMMGAPIVYRMLLQQDLSSYKFPHLQNCVTVGESLLPETLENWRAQTGLDIRESYGQTETGLTCMVSKTMKIKPGYMGTAASCYDVQIIDDKGNVLPPGTEGDIGIRVKPIRPIGIFSGYVDNPDKTAANIRGDFWLLGDRGIKDEDGYFQFMGRADDIINSSGYRIGPSEVENALMEHPAVVETAVISSPDPVRGEVVKAFVVLASQFLSHDPEQLTKELQQHVKSVTAPYKYPRKIEFVLNLPKTVTGKIQRAKLRDKEWKMSGKARAQ

SEQ ID NO: 3483 - protein, 203 aa, Homo sapiens [sequence omitted]

SEQ ID NO: 3484 - protein, 164 aa, Homo sapiens
MVTWSHSNSNKELKQENSALAEQLQVVLIDKAGMQCDLEELKKKLELTELTLQQVMEWLKYLQMEREQYAEYLHGESAMWWQRMREMSEQVHTLREERVHSMSRVQELETILAELRNQLNPCPRSLQQGPPKWSRSYKQRLSTCGRSWRIWQDSFKPKWKKMRA

SEQ ID NO: 3485 - protein, 577 aa, Homo sapiens
MGQPSLTWMLMVVVASWFITTAATDTSEARWCSECHSNATCTEDEAVTTCTCQEGFTGDGLTCVDLDECAIPGAHNCSANSSCVNTPGSFSCGPGLDCVPEGDALVCADPCQAHRTLDEYWRSTEYGEGYACDTDLRGWYRFVGQGGARMAETCVPVLRCNTAAPMWLNGTHPSSDEGIVSRKACAHWSGHCCLWDASVQVKACAGGYYVYNLTAPPECHLAYCTDPSSVEGTCEECSIDEDCKSNNGRWHCQCKQDFNITDISLLEHRLECGANDMKVSLGKCQLKSLGFDKVFMYLSDSRCSGFNDRDNRDWVSVVTPARDGPCGTVLTRNETHATYSNTLYLADEIIIRDLNIKINFACSYPLDMKVSLKTALQPMVSALNIRVGGTGMFTVRMALFQTPSYTQPYQGSSVTLSTEAFLYVGTMLDGGDLSRFALLMTNCYATPSSNATDPLKYFIIQDRCPHTRDSTIQVVENGESSQGRFSVQMFRFAGNYDLVYLHCEVYLCDTMNEKCKPTCSGTRFRSGSVIDQSRVLNLGPITRKGVQATVSRAFSSLGLLKVWLPLLLSATLTLTFQ

SEQ ID NO: 3486 - protein, 430 aa, Homo sapiens
MAEAVLIDLFGLKLNSQKNCHQTLLKTLNAVQYHHAAKAKFLCIMCCSNISYERDGEQDNCEIETSNGLSALLEEFEIVSCPSMAATLYTIKQKIDEKNLSSIKVIVPRHRKTLMKAFIDQLFTDVYNFEFEDLQVTFRGGLFKQSIEINVITAQELRGIQNEIETFLRSLPALRGKLTIITSSLIPDIFIHGFTTRTGGISYIPTLSSFNLFSSSKRRDPKVVVQENLRRLANAAGFNVEKFYRIKTHHSNDVWIMGRKEPDSYDGITTNQRGVTIAALGADCIPIVFADPVKKACGVAHAGWKGTLLGVAMATVNAMIAEYGCSLEDIVVVLGPSVGPCCFTLPRESAEAFHNLHPACVQLFDSPNPCIDIRKATRILLEQGGILPQNIQDQNQDLNLCTSCHPDKFFSHVRDGLNFGTQIGFISIKE

SEQ ID NO: 3487 - protein, 236 aa, Homo sapiens
MDHIQHRLVEKITKMLDRGLDPNFHDPETGETPLTLAAQLDDSVEVIKALKNGGAHLDFRAKDGMTALHKAARARNQVALKTLLELGASPDYKDSYGLTPLYHTAIVGGDPYCCELLLHEHATVCCKDENGWHEIHQACRYGHVQHLEHLLFYGADMSAQNASGNTALHICALYNQDSCARVLLFRGGNKELKNYNSQTPFQMDSHSVAQSAMARSRLTATSTSRVQAILLPQPPK

SEQ ID NO: 3488 - protein, 590 aa, Homo sapiens
MNPREEKVKIITEEFIENDEDADMGRQNKNSKVRRQPRKKQPPTAVPKEMVSEKSHLGNPQEPVQEEPKTRLLSMTVRRGPRSLPPIPSTSRTGFAEFSMRGRMREKLQAARSKAESALLQEIPTPRPRRLRSPSKKELETEFGTEPGKEVERTQQEVDSQSYSRVKFHDSARKIKPKPQVPPGFPSAEEAYNFFTFNFDPEPEGSEEKPKARHRAGTNQEEEEGEEEPPAQGGGKEMDEEELLNGDDAEDFLLGLDHVADDFVAVRPADYESIHDRLQMEREMLFIPSRQTVPTYKKLPENVQPRFLEDEGLYTGVRPEVARTNQNIMENRLLMQDPERRWFGDDGRILALPNPIKPFPSRPPVLTQEQSIKAELETLYKKAVKYVHSSQHVIRSGDPPGNFQLDIGISGLIFTHHPCFSREHVLAAKLAQLYDQYLARHQRNKAKFLTDKLQALRNAVQTGLDPEKPHQSLDTIQKTINEYKSEIRQTRKFRDAEQEKDRTLLKTIIKVWKEMKSLREFQRFTNTPLKLVLRKEKADQKADEEAYEAEIQAEISELLEEHTEEYAQKMEEYRTSLQQWKAWRKVQRAK

SEQ ID NO: 3489 - protein, 118 aa, Homo sapiens [sequence omitted]

SEQ ID NO: 3490 - protein, 104 aa, Homo sapiens
MAERPEDLNLPNAVITRIIKEALPDGVNISKEARSAISRAASVFVLYATSCANNFAMKGKRKTLNASDVLSAMEEMEFQRFVTPLKEEGQRQKNRLGRARQEQG

SEQ ID NO: 3491 - protein, 153 aa, Homo sapiens [sequence omitted]

SEQ ID NO: 3492 - protein, 663 aa, Homo sapiens [sequence omitted]

SEQ ID NO: 3493 - protein, 354 aa, Homo sapiens [sequence omitted]

SEQ ID NO: 3494 - protein, 775 aa, Homo sapiens [sequence omitted]

SEQ ID NO: 3495 - protein, 106 aa, Homo sapiens
MKMSSCWSRVDSEPSGTSVLIKKREIWTHTEQRPPCEDGGRDRRDAATRHKCLGLPETTRSLPQRLQQEHGSANTLILVFQPPERFPKIPFSTGVWCKMRHIFHGW

SEQ ID NO: 3496 - protein, 338 aa, Homo sapiens [sequence omitted]

SEQ ID NO: 3497 - protein, 141 aa, Homo sapiens [sequence omitted]

SEQ ID NO: 3498 - protein, 159 aa, Homo sapiens [sequence omitted]

SEQ ID NO: 3499 - protein, 224 aa, Homo sapiens
MANSGLQLLGYFLALGGWVGIIASTALPQWKQSSYAGDAIITAVGPYEGLWMSCASQSTGQVQCKLYDSLLALDGHIQSARALMVVAVLLGFVAMVLSVVGMKCTRVGDSNPIAKGRVAIAGGALFILAGLCTLTAVSWYATLVTQEFFNPSTPVNARYEFGPALFVGWASAGLAVLGGSFLCCTCPEPERPNSSPQPYRPGPSAAAREPVVKLPASAKGPLGV

SEQ ID NO: 3500 - protein, 127 aa, Homo sapiens [sequence omitted]

SEQ ID NO: 3501 - protein, 655 aa, Homo sapiens
MPRQSLEQGPRMRPRHGPRVNLTEAVSQAEGVSQTNAVAWPLATAESGSVTKSKGLSMDRELVNVDAETFPGTQGQKGIQPWFGPGEETNMGSWYYSRPRAREEASNESGFWSADETSTASSFWTGEETSVRSWPREESNTRSRHRAKHQTNPRSRPRSKQEAYVDSWSGSEDEASNPFSFWVGENTNNLFRPRVREEANIRSKLRTNREDCFESESEDEFYKQSWVLPGEEANSRFRHRDKEDPNTALKLRAQKDVDSDRVKQEPRFEEEVIIGSWFWAEKEASLEGGASAICESEPGTEEGAIGGSAYWAEEKSSLGAVAREEAKPESEEEAIFGSWFWDRDEACFDLNPCPVYKVSDRFRDAAEELNASSRPQTWDEVTVEFKPGLFHGVGFRSTSPFGIPEEASEMLEAKPKNLELSPEGEEQESLLQPDQPSPEFTFQYDPSYRSVREIREHLRARESAESESWSCSCIQCELKIGSEEFEEFLLLMDKIRDPFIHEISKIAMGMRSASQFTRDFIRDSGVVSLIETLLNYPSSRVRTSFLENMIHMAPPYPNLNMIETFICQVCEETLAHSVDSLEQLTGIRMLRHLTMTIDYHTLIANYMSGFLSLLTTANARTKFHVLKMLLNLSENPAVAKKTIQCQSSFNICGSL

SEQ ID NO: 3502 - protein, 145 aa, Homo sapiens [sequence omitted]

SEQ ID NO: 3503 - protein, 138 aa, Homo sapiens [sequence omitted]

SEQ ID NO: 3504 - protein, 138 aa, Homo sapiens
MPFAALPGSWHGARCVRPGSHAKAPAPGFCHLFCPATLSWSLPSLQKLQEEACRQEKRTAGVSNLRNGRPRFSNLINSMTSQDGLLTRVEPCTARNAVSCSAPETPGLSLQHSPQHFHTGGLWLSRHRSALSFPSQLS

SEQ ID NO: 3505 - protein, 559 aa, Homo sapiens
MNQSWVFTRVIGVSREEAGALEAASDVDLTLHQQEGAPNSSYTFSSIARVRMEENFIQKAEGVEPRLKGKVYDYYVESTSQAIFQGRLAPRTAALTEVPSPRPPPGSLGTGAASGGQAGDTKGAAERAASPQPGPWPSTRGFSRKESLLQIAENPELQLQPDGFRLPAPPCPDPGALPGLGRSSREPHVQPVAGTNFFHIPLTPASAPQVRLDLGNCYEVLTLAKRQNLEALKEAAYKVMSENYLQVLRSPDIYGCLSGAERELILQRRLRGRQYLVVADVCPKEDSGGLCCYDDEQDVWRPLARMPPEAVSRGCAICSLFNYLFVVSGCQGPGHQPSSRVFCYNPLTGIWSEVCPLNQARPHCRLVALDGHLYAIGGECLNSVERYDPRLDRWDFAPPLPSDTFALAHTATVRAKEIFVTGGSLRFLLFRFSAQEQRWWAGPTGGSKDRTAEMVAVNGFLYRFDLNRSLGIAVYRCSASTRLWYECATYRTPYPDAFQCAVVDNLIYCVGRRSTLCFLADSVSPRFVPKELRSFPAPQGTLLPTVLTLPTPDLPQTRV

SEQ ID NO: 3506 - protein, 172 aa, Homo sapiens
MGPGLFPAFLLRPQVTASTRLLPVCASPRSSPGLGHSKEAAAPAPIGELAPGSFLAAVVDALELGPPVVISPSLSGMYSLPFLTAPGSQLPGFVPVAPICTDKINAANYASVKTPALIVYGDQDPMGQTSFEHLKQLPNHRVLIMKGAGHPCYLDKPEEWHTGLLDFLQGLQ

SEQ ID NO: 3507 - protein, 437 aa, Homo sapiens
MVQMMRQFLYRVLPEDSYKVTTGKLHVSLTRLTDGENVVVSEFTSKEELIEALYCSCFVPVYCGLIPPTYRGVRYIDGGFTGMQPCAFWTDAITISTFSGQQDICPRDCPAIFHDFRMFNCSFQFSLENIARMTHALFPPDLVILHDYYYRGYEDAVLYLRRLNAVYLNSSSKRVIFPRVEVYCQIELALGNECPERSQPSLRARQASLEGATQPHKEWVPKGDGRGSHGPPVSQPVQTLEFTCESPVSAPVSPLEQPPAQPLASSTPLSLSGMPPVSFPAVHKPPSSTPGSSLPTPPPGLSPLSPQQQVQPSGSPARSLHSQAPTSHRPSLGPSTVGAPQTLPRSSLSAFPAQPPVEELGQEQPQAVALLVSSKPKSAVPLVHVKETVSKPYVTESPAEDSNWVNKVFKKNKQKTSGTRKGFPRHSGSKKPSSKVQ

SEQ ID NO: 3508 - protein, 111 aa, Homo sapiens [sequence omitted]

SEQ ID NO: 3509 - protein, 572 aa, Homo sapiens [sequence omitted]

SEQ ID NO: 3510 - protein, 120 aa, Homo sapiens
MTPPASKPSLAVPCCSRSEDERESSSQGLRGDTSADCPQGERGERNEGGSLKNGDLQEGGQPRGPVEARKSTGAWQGLKPMSQGRSSCKAPQPQRSASPALPFWTRHECEETLACPHYQG

SEQ ID NO: 3511 - protein, 273 aa, Homo sapiens
MDSLQDTVALDHGGCCPALSRLVPRGFGTEMWTLFALSGPLFLFQVLTFMIYIVSTVFCGHLGKVELASVTLAVAFVNVCGVSVGVGLSSACDTLMSQSFGSPNKKHVGVILQRGVLVLLLCCLPCWALFLNTQHILLLFRQDPDVSRLTQDYVMIFIPGLPVIFLYNLLAKYLQNQVQVFGVWGGPSPSTLPYSSGRGAWGFPLLSTICEPALERGHFQPTCHILTSRTEAGERLCVPASSNSSTGMAEGAGGGVPIPNPGFVHPPSISLTP

SEQ ID NO: 3512 - protein, 160 aa, Homo sapiens
MPAISVSPSLQKYSKQQKLNTYEVNTKDLHRKISGSSVDAIARCSAGQSSGLSFDFGPVLQNQQPFSQKTVECSQDHLWKVNYSIFNLLPWAMMSETQHGGRTSSCVGNLSEPPWRPPKWLWQSCRGGGNKKGDTWLSFLNQLTMGTHLYWNFRVRKYQN

SEQ ID NO: 3513 - protein, 261 aa, Homo sapiens
MSLPNPILQWNSGYLQTDLPALQVFDEIRSESPFFSRARFQAVEQADLGLRPLPHTRPARPARGQHRTQPLRGRGWRGPLGLRAALQQVTLTATPRVRGRPTLRPGFWAQPPGPGEGVWPGFCWSWLRGPGSGSPEGRLRRRWAPEQSGRRLGASATQEGERGGFKGSQRPRLQDGAPERGPHGRSDSENPRPREARRPAPFSLSLSPSSAAPSLRAGRAAPGPAAGRATLRSAAAAIPRAARGAPRTHPPSLPPPHRPAA

SEQ ID NO: 3514 - protein, 117 aa, Homo sapiens [sequence omitted]

SEQ ID NO: 3515 - protein, 164 aa, Homo sapiens
MGQKKTMGTERSRGGKRGPQPGAERPEEPGATFSKKPPEGARAPRCLSRPTAPKSGACLARRRPPGSPCSIRDAPFHTGDDRFLARENFPNVLQPLPRMFAVQRAADFESQCPRRWDSRKRPSEGLPSAGWGRWRGRPTHLGLWVSGSVRRKVSGSHVSRSLHL

SEQ ID NO: 3516 - protein, 345 aa, Homo sapiens
MRDKATQTESAWAEEYSEKKKGSHKRSASWGSTDQLKEIAKLRQQLQRSKHSSRHHRDKERQSPFHGNHAAINQCQAPVPKSALIPVIPITKSTGSRFRNSVEGLNQEIEIIIKETGEKEEQLIPQDIPDGHRAPPPLVQRSSSTRSIDTQTPGGADRGSNNSSRSQSVSPTSFLTISNEGSEESPCSADDLLVDPRDKENGNNSPLPKYATSPKPNNSYMFKREPPEGCERVKVFEECSPKQLHEIPAFYCPDKNKVNFIPKSGSAFCLVSILKPLLPTPDLTLKGSGHSLTVTTGMTTTLLQPIAVASLSTNTEQDRVSRGTSTVMPSASLLPPPEPIEEAEG

SEQ ID NO: 3517 - protein, 158 aa, Homo sapiens [sequence omitted]

SEQ ID NO: 3518 - protein, 151 aa, Homo sapiens
MSFPLCNGSDQQIFLVFIWQNKLTTLSVVPCPALPFFLSLSFLHFFFPPSLSFLPSFSFFLSSFFLSFFSFFLSLSLFLSLSFSLSLSFLSLSPFLFLSLSPFLFLSLSFSCSLFLFLDSTVYIPKSRKCSDDQIWSWNGVTKDSLVSLDG

SEQ ID NO: 3519 - protein, 488 aa, Homo sapiens
MTADKDKDKDKEKDRDRDRDREREKRDKARESENSRPRRSCTLEGGAKNYAESDHSEDEDNDNNSATAEESTKKNKKKPPKKKSRYERTDTGEITSYITEDDVVYRPGDCVYIESRRPNTPYFICSIQDFKLVHNSQACCRSPTPALCDPPACSLPVASQPPQHLSEAGRGPVGSKRDHLLMNVKWYYRQSEVPDSVYQHLVQDRHNENDSGRELVITDPVIKNRELFISDYVDTYHAAALRGKCNISHFSDIFAAREFKARVDSFFYILGYNPETRRLNSTQGEIRVGPSHQAKLPDLQPFPSPDGDTVTQHEELVWMPGVNDCDLLMYLRAARSMAAFAGMCDGGSTEDGCVAASRDDTTLNALNTLHESGYDAGKALQRLVKKPVPKLIEKCWTEDEVVSRNQHLPCALGHRATGVSVCDLPAAQGKQKLQSCRMAVRGSARQEDGALQPLNCTERLDFIKIRLHRCRERLSNFHGKKGEIDSYS

SEQ ID NO: 3520 - protein, 234 aa, Homo sapiens [sequence omitted]

SEQ ID NO: 3521 - protein, 110 aa, Homo sapiens
MASAIKDEDDEDRIIAELEVFERSSVSSLPPTPRRQLIPTLLSPQDLGPPGGSAPGPTRKSGGGSVPPMKVVTPGASRLKAAQGQAGSPDKSKHGKQRAEYMRIQAQQQV

SEQ ID NO: 3522 - protein, 111 aa, Homo sapiens
MALGHEFYFNQRTKLICKSCLGEISGNKRSNVSAVLPSLSRRIKGKCKLSQGDFHLYLNYLLYTLYFWLIDWERALQIKNFLYKCHIYFSTGGLVLCCHKDLEWHLCYKFR

SEQ ID NO: 3523 - protein, 333 aa, Homo sapiens [sequence omitted]

SEQ ID NO: 3524 - protein, 621 aa, Homo sapiens [sequence omitted]

SEQ ID NO: 3525 - protein, 223 aa, Homo sapiens [sequence omitted]

SEQ ID NO: 3526 - protein, 132 aa, Homo sapiens [sequence omitted]

SEQ ID NO: 3527 - protein, 139 aa, Homo sapiens
MERHRQHPACDFTGPTHPGPLEQDHGWIPGTGGVEVDPGKCRVKGGLRCTPCGLGSTSQKSNKDSRTHSTSSIPWPSVEPQSLRLWQGLFLRWTCSPEPAEAAWGKSVANSDRKGEDRSLSANCFSRAPILSTGSLDSS

SEQ ID NO: 3528 - protein, 129 aa, Homo sapiens
MLLKVRRASLKPPATPHQGAFRAGNVIGQLIYLLTWSLFTAWLRPPTLLQGPRTSPQGSPPRSPWGDCAEPSCLCEMKIRRRRHEGPAWGQSGFLAGGLHLVPSSLSLAACGVVRMKGLWGRGAGIRGR

SEQ ID NO: 3529 - protein, 136 aa, Homo sapiens [sequence omitted]

SEQ ID NO: 3530 - protein, 100 aa, Homo sapiens [sequence omitted]

SEQ ID NO: 3531 - protein, 175 aa, Homo sapiens [sequence omitted]

SEQ ID NO: 3532 - protein, 178 aa, Homo sapiens
MTLTLSVLICLGLSVGPRTCVQAGTLPKPTLWAEPASVIARGKPVTLWCQGPLETEEYRLDKEGLPWARKRQNPLEPGTYRCYSAIRSYPYLLSSPSYPQELVVSGEGPDPVLSKLKGSAQALPPGELWAGMESRCGGEGLRGAQPEGDSPLRGEEDNGGSPGMPTLGPISWDANGER

SEQ ID NO: 3533 - protein, 209 aa, Homo sapiens [sequence omitted]

SEQ ID NO: 3534 - protein, 100 aa, Homo sapiens
MCVWLVPGNTAPHVVMMWPTCTLPGGGSLPESLRRVQELTGRSVEFEEMDILDQGALQRLFKKVGAGWARWLTPVIPALWKAEVRRSLEPRCSRPACSTQ

SEQ ID NO: 3535 - protein, 122 aa, Homo sapiens [sequence omitted]

SEQ ID NO: 3536 - protein, 168 aa, Homo sapiens
MLENVLASHSKMQGALEKVQIELGRRDSEIAGLKKERDLNQQRVQKLEAEVDQWQARMLVMEDQHNSEIESLQKALGVAREDNRKLAMSLEQALQTNNHLQTKLDHIQEQLESKELERQNLETFKDRMTEESKVEAELHAERIEALRKQFQTERETTKKVAQREVAEV

SEQ ID NO: 3537 - protein, 329 aa, Homo sapiens
MQLFLLLCLVLLSPQGASLHRHHPREMKKRVEDLHVGATVAPSSRRDFTFDLGNALFTDLVVDLQDTFVSAMKTLYLADTFPTNFRDSAGAMKQINDYVAKQTKGKIVDLLKNLDSNAVVIMVNYIFFKAKWETSFNHKGTQEQDFYVTSETVVRVPMMSREDQYHYLLDRNLSCRVVGVPYQGNATALFILPSEGKMQQVENGLSEKTLRKWLKMFKKRQLELYLPKFSIEGSYQLEKVLPSLGISNVFTSHADLSGISNHSNIQVSEMVHKAVVEVDESGTRAAAATGTIFTFRSARLNSQRLVFNRPFLMFIVDNNILFLGKVNRP

SEQ ID NO: 3538 - protein, 123 aa, Homo sapiens [sequence omitted]

SEQ ID NO: 3539 - protein, 460 aa, Homo sapiens
MSTRYHQAASDSYLELLKEATKRDLNLSDEDGMTPTLLAAYHGNLEALEIICSRGGDPDRCDIWGNTPLHFAASNGHAHCVSFLVNFGANIFALDNDLQTPLDAAASREQNECVALLDKAATAQNIMNPKKVTRLKEQAQKNARRQIKECERLQEKHQNKMAHTYSKEESGTLSSSKGTFSRSSPSNASAPGTFGSLSKGIKDTFKIKFKKNKDTAEQVGKEGRSGQRNVMEVFREEEEDSFSGDFKEKLQLSAEEDGSVHHESILNRPGLGSIVFRRNRISSPEDISDSKREFGFKLPSELLQRQGASEADEGAADEEGEENGLKDDLPWDDDEVEWEEDVVDATPLEVFLLSQHLEEFLPIFKREQIDLEALLLCSDEDLQSIQMQLGPRKKVLNAINRRKQVLQQPGQLVDTSLRWRVLAWSIGVMLWPAGSTPGGTPSLPNARPLGMDSRASEMPT

SEQ ID NO: 3540 - protein, 182 aa, Homo sapiens [sequence omitted]

SEQ ID NO: 3541 - protein, 105 aa, Homo sapiens
MSCNTHREGPAASLLSQPARPRTHQKEETPNTSEHQKEQTLDTLPLRTVILTVRARGFILEVSETKNPPIPDTVGSQREPTVQAMTSWDPALLHMIKLHHGSCTR

SEQ ID NO: 3542 - protein, 638 aa, Homo sapiens
MASEIHMPGPVCLIENTKGHLVVNSEALEILSAITQPVVVVAIVGLYRTGKSYLMNKLAGKNKGFPLGCTVKSETKGIWMWCVPHPSKPNHTLILLDTEGLGDMEKSDPKSDSWIFALAVLLSSSFVYNSMGTINHQALEQLHYVTELTELIRAKSCPRPDEVEDSSEFVSFFPDFIWTVRDFTLELKLDGHPITEDEYLENALKLISGKNPQIQNSNKPREWIRHFFPKQKCFVFDRPINDKKLLLHVEEVREDQLDSNFQMQSENFCSYIFTHAKTKTLREGILVTGNRLGMLVETYLDAINSGATPCLENAMAVLAQCENSAAVQRAANHYSQQMAQQVRFPTDTLQELLDVHAVCEREAIAVFMEYSFKDKSQEFQKKLVDTMEKKKEDFVLQNEEASAKYCQAELKRLSELLTESISRGTFFVPGGHNIYLEAKKKIEQDYTLVPRKGVKADEVLQSFLQSQVVIEESILQSDKALTAGEKAIAAKQAKKEAAEKEQELLRQKQKEQQQMMEAQERSFQENIAQLKKKMERERENYMRELRKMLSHKMKVLEELLTEGFKEIFESLNEEINRLKEQIEAAENEEPSVFSQILDVAGSIFIAALPGAAKLVDLGMKILSSLCNRLRNPGKKIIS

SEQ ID NO: 3543 - protein, 240 aa, Homo sapiens
MSQHQQACGICRQEDPPEDMKQDRDIQAVATSLLPLTEANLRMFQRAQDDLIPAVDRQFACSSCDHVWWRRVPQRKEVSRCRKCRKRYEPVPADKMWGLAEFHCPKCRHNFRGWAQMGSPSPCYGCGFPVYPTRILPPRWDRDPDRRSTHTHSCSAADCYNRREPHVPGTSCAHPKSRKQNHLPKVLHPSNPHISSGSTVATCLSQGGLLEDLDNLILEDLKEEEEEEEEVEDEEGGPRE

SEQ ID NO: 3544 - protein, 118 aa, Homo sapiens
MSSEDDQRSLWSPSWFWWVWAGFFTTSCFVSRVFVTCILCPPPILSCDLECPNLLGMQPSGVSALFYPTPIQDGGHSGSDGHSDIPVSLLHSLSSATLARHLVFQTLTQKLGAGVGEA

SEQ ID NO: 3545 - protein, 503 aa, Homo sapiens [sequence omitted]

SEQ ID NO: 3546 - protein, 685 aa, Homo sapiens
MLWFSGVGALAERYCRRSPGITCCVLLLLNCSGVPMSLASSFLTGSVAKCENEGEVLQIPFITDNPCIMCVCLNKEVTCKREKCPVLSRDCALAIKQRGACCEQCKGCTYEGNTYNSSFKWQSPAEPCVLRQCQEGVVTESGVRCVVHCKNPLEHLGMCCPTCPGCVFEGVQYQEGEEFQPEGSKCTKCSCTGGRTQCVREVCPILSCPQHLSHIPPGQCCPKCLGQRKVFDLPFGSCLFRSDVYDNGSSFLYDNCTACTCRDSTVVCKRKCSHPGGCDQGQEGCCEECLLRVPPEDIKVCKFGNKIFQDGEMWSSINCTICACVKGRTECRNKQCIPISSCPQGKILNRKGCCPICTEKPGVCTVFGDPHYNTFDGRTFNFQGTCQYVLTKDCSSPASPFQVLVKNDARRTRSFSWTKSVELVLGESRVSLQQHLTVRWNGSRIALPCRAPHFHIDLDGYLLKVTTKAGLEISWDGDSFVEVMAAPHLKGKLCGLCGNYNGHKRDDLIGGDGNFKFDVDDFAESWRVESNEFCNRPQRKPVPELCQGTVKVKLRAHRECQKLKSWEFQTCHSTVDYATFYRSCVTDMCECPVHKNCYCESFLAYTRACQREGIKVHWEPQQNCAATQCKHGAVYDTCGPGCIKTCDNWNEIGPCNKPCVAGCHCPANLVLHKGRCIKPVLCPQR

SEQ ID NO: 3547 - protein, 745 aa, Homo sapiens
MEEHSYIQKELDLQNGSLEEDSVVHSVENDSQNMMESLSPKKYSSSLRFKANGDYSGSYLTLSQPVPAKRSPSPLGTSVRSSPSLAKIQGSKQFSYDGTDKNIPMKPPTPLLNTTSSLSGYPLGRADFDHYTGRDSERALRLSEKPPYSKYSSRHKSHDNVYSLGGLEGRKASGSLLAMWNGSSLSDAGPPPISRSGAASMPSSPKQARKMSIQDSLALQPKLTRHKELASENINLRTRKYSSSSLSHMGAYSRSLPRLYRATENQLTPLSLPPRNSLGNSKRTKLGEKDLPHSVIDNDNYLNFSSLSSGALPYKTSASEGNPYVSSTLSVPASPRVARKMLLASTSSCASDDFDQASYVGTNPSHSLLAGESDRVFATRRNFSCGSVEFDEADLESLRQASGTPQPALRERKSSISSISGRDDLMDYHRRQREERLREQEMERLERQRLETILSLCAEYTKPDSRLSTGTTVEDVQKINKELEKLQLSDEESVFEEALMSPDTRYRCHRKDSLPDADLASCGSLSQSSASFFTPRSTRNDELLSDLTRTPPPPSSTFPKASSESSYLSILPKTPEGISEEQRSQELAAMEETRIVILNNLEELKQKIKDINDQMDESFRELDMECALLDGEQKSETTELMKEKEILDHLNRKIAELEKNIVGEKTKDADLLDVESKHFEDLEFQQLEHESRLDEEKENLTQQLLREVAEYQRNIVSRKEKISALKKQANHIVQQAQREQDHFVK

SEQ ID NO: 3548 - protein, 632 aa, Homo sapiens [sequence omitted]

SEQ ID NO: 3549 - protein, 214 aa, Homo sapiens [sequence omitted]

SEQ ID NO: 3550 - protein, 169 aa, Homo sapiens [sequence omitted]

SEQ ID NO: 3551 - protein, 929 aa, Homo sapiens
MNRRRKFLLASVLALQNSSFIYPSCQKCFSRIILVSKRSNCPKCGSTGESGNANYRYKLSLKVAESNKLFVITVFGSCLDTFFGLTATGLHRYIQDPNKIPETLDNDTTQNLLTKAVETCFVGQSFIFGVTNFENQPGQGSDASNFLQQCSDHKRKAKALVACQIVLPDPGIAGFTVIDYFHQLLQTFNFRKLQCDSQAPNNHLLALDHSNSDLSSIYTSDSTSDFFKSCSKDTFSKFWQPSLEFTCIVSQLTDNDDFSASEQSKAFGTLQQNRKSISIAEATGSSSCHDPIQDSWSLVSYMDKKSTAEKLGKELGLQAKELSAVHSSHHEIGVNDSNLFSLEMREPLESSNTKSFHSAVEIKNRSQHELPCFQHHGIDTPTSLQKRSACCPPSLLRLEETASSSQDGDPQIWDDLPFSESLNKFLAVLESEIAVTQADVSSRKHHVDNDIDKFHADHSSLSVTPQRTTGALHTPPIALRSSQVIVKANCSKDDFLFNCKGNLSPSVEKESQPDNKVEAVSVNHNGRDMSEYFLPNPYLSALSSSSKDLETIVTLKKTIRISPHRESDHSSLNNKYLNGCGEISVSEMNEKLTTLCYRKYNDVSDLCKLENKQYCRWSKNQDDSFTICRELTYPLETLCNSPNRSTNTLKEMPWGHINNNVTQSYSIGYEGSYDASADLFDDIAKEMDIATEITKKSQDILLKWGTSLAESHPSESDFSLRSLSEDFIQPSQKLSLQSLSDSRHSRTCSPTPHFQSDSEYNFENSQDFVPCSQSTPISGFHQTRIHGINRAFKKPVFYSDLDGNYEKIRIFPENDKQQASPSCPKNIKTPSQKIRSPIVSGISQPDVFNHYPFAECHETDSDEWVPPTTQKIFPSDMLGFQGIGLGKCLAAYHFPDQQELPRKKLKHIRQGTNKGLIKKKLKNMLAAVV

SEQ ID NO: 3552 - protein, 736 aa, Homo sapiens
MKNMEKELLCPVCQEMYKQPLVLPCTHNVCQACAREVLGQQGYIGHGGDPSSEPTSPASTPSTRSPRLSRRTLPKPDRLDRLLKSGFGTYPGRKRGALHPQVIMFPCPACQGDVELGERGLAGLFRNLTLERVVERYRQSVSVGGAILCQLCKPPPLEATKGCTECRATFCNECFKLFHPWGTQKAQHEPTLPTLSFRPKGLMCPDHKEEVTHYCKTCQRLVCQLCRVRRTHSGHKITPVLSAYQALKDKLTKSLTYILGNQDTVQTQICELEEAVRHTEVSGQQAKEEVSQLVRGLGAVLEEKRASLLQAIEECQQERLARLSAQIQEHRSLLDGSGLVGYAQEVLKETDQPCFVQAAKQLHNRIARATEALQTFRPAASSPFRHCQLDAGREMKLLTELNFLRVPEAPVIDTQRTFAYDQIFLCWRLPPHSPPAWHYTVEFRRTDVPAQPGPTRWQRREEVRGTSALLENPDTGSVYVLRVRGCNKAGYGEYSEDVHLHTPPAPVLHFFLDSRWGASRERLAISKDQRAVRSVPGLPLLLAADRLLTGCHLSVDVVLGDVAVTQGRSYWACAVDPASYLVKVGVGLESKLQESFQGAPDVISPRYDPDSGHDSGAEDATVEASPPFAFLTIGMGKILLGSGASSNAGLTGRDGPTAGCTVPLPPRLGICLDYERGRVSFLDAVSFRGLLECPLDCSGPVCPAFCFIGGGAVQLQEPVGTKPERKVTIGGFAKLD

SEQ ID NO: 3553 - protein, 232 aa, Homo sapiens
MANWVFCNRCFQPPHRTSCFSLTNCGHVYCDACLGKGKKNECLICKAPCRTVLLSKHTDADIQAFFMSIDSLCKKYSRETSQILEFQEKHRKRLLAFYREKISRLEESLRKSVLQIEQLQSMRSSQQTAFSTIKSSVSTKPHGCLLPPHSSAPDRLESMEVDLSPSPIRKSEIAAGPARISMISPPQDGRMAPCARRVCHFQRFTMFLHRRLSSLAAPPSVQFWKARGTHQL

SEQ ID NO: 3554 - protein, 213 aa, Homo sapiens
MDPLQKRNPASPSKSSPMTAAETSQEGPAPSQPSYSEQPMMGLSNLSPGPGPSQAVPLPEGLLRQRYREEKTLEERRWERLEFLQRKKAFLRHVRRRHRDHMAPYAVGREARISPLGDRSQNRFRCECRYCQSHRPNLSGIPGESNRAPHPSSWETLVQGLSGLTLSLGTNQPGPLPEAALQPQETEEKRQRERQQESKIMFQRLLKQWLEEN

SEQ ID NO: 3555 - protein, 125 aa, Homo sapiens
MWRALCKALTDLASALFLAKCCFLMTLCLVTFLTSLPTSVPACTSCWPGFMRSSKNAYDTHHWGGQRSMNLESLTCGQLAIRWTRGWMTRPRQVWAMPGQTVDVYLGRMLQGVVLRGQTLRGRAS

SEQ ID NO: 3556 - protein, 138 aa, Homo sapiens
MSHRAQLIFVFLFYLFIYFLGDGVLLCHPGWSAVVRSWLTATSASQVAGITGMHHHAQLIFVFLVEMGFHCVGQAGLELLTSGDPPASASQSAGIIGVSHCTRPNFCIFSRDGVSPCWLSWSGTHGLKLSAHLSLPKC

SEQ ID NO: 3557 - protein, 84 aa, Homo sapiens
MANALASATCERCKGGFAPAETIVNSNGELYHEQCFVCAQCFQQFPEGLFYEVSCTGQKQGGAIPHPPASCPSFLRTPPSCSVS

SEQ ID NO: 3558 - protein, 352 aa, Homo sapiens [sequence omitted]

SEQ ID NO: 3559 - protein, 213 aa, Homo sapiens
MDQEPVGGVERGEAVAASGAAAAAAFGESAGQMSNERGFENVELGVIGKKKKVPRRVIHFVSGETMEEYSTDEDEVDGLEKKDVLPTVDPTKLTWGPYLWFYMLRAATSTLSVCDFLGEKIASVLGISTPKYQYAIDEYYRMKKEEEEEEEENRMSEEAEKQYQQNKLQTDSIVQTDQPETVISSSFVNVNFEMEGDSEVIMESKQNPVSVPP

SEQ ID NO: 3560 - protein, 136 aa, Homo sapiens
MTTGRCIAPRVWQFVSAVLFSGIAIMALAFPDQLYDAVFDGAQVTSKTPIRLYGGALLSISLIMWNALYTAEKVIIRWTLLTEACYFGVQFLVVTATLAETGLMSLGILLLLVSRLLFVVISIYYYYQVGRRPKKA

SEQ ID NO: 3561 - protein, 311 aa, Homo sapiens
MAAAAAAAAAAAAAAQCRSPRCAAERRGFRRELDSWRHRLMPCVGFESILEGLYGPRLRRDLSLFEDCEPEELTDWSMDEKCSFCNLQREAVSDCIPSLDSSQSTPTEELSSQGQSNTDKIECQAENYLNALFRKKDLPQNCDPNIPLVAQELMKKMIRQFAIEYISKSGKTQENRNGSIGPSIVCKSIQMNQAENSLQEEQEGPLDLTVNRMQEQNTQQGDGVLDLSTKKTSIKSEESSICDPSSENSVAGMLQVKTDEKLNVSDENTASCPLSPIKMCLNRPIEWNLNLTTASLTSCTVHNQNLKSEEK

SEQ ID NO: 3562 - protein, 159 aa, Homo sapiens
MEVRWCATSDPEQHKCGNMSEAFREAGIQPSLLCVRGTSADHCVQLIAAQEADAITLDGGAIYEAGKEHGLKPVVGEVYDQGKRVQWEERGQPALEVSSPGCPCWAWPELAISPVHRAVLESQPEERPKALSNSPGTGAPGTQRAAPSLLLPAGSPAAP

SEQ ID NO: 3563 - protein, 475 aa, Homo sapiens
MVEDLAASYIVLKLENEIRQAQVQWLMEENAALQAQIPELQKSQAAKEYDLLRKSSEAKEPQKLPEHMNPPAAWEAQKTPEFKEPQKPPEPQDLLPWEPPAAWELQEAPAAPESLAPPATRESQKPPMAHEIPTVLEGQGPANTQDATIAQEPKNSEPQDPPNIEKPQEAPEYQETAAQLEFLELPPPQEPLEPSNAQEFLELSAAQESLEGLIVVETSAASEFPQAPIGLEATDFPLQYTLTFSGDSQKLPEFLVQLYSYMRVRGHLYPTEAALVSFVGNCFSGRAGWWFQLLLDIQSPLLEQCESFIPVLQDTFDNPENMKDANQCIHQLCQGEGHVATHFHLIAQELNWDESTLWIQFQEGLASSIQDELSHTSPATNLSDLITQCISLEEKPDPNPLGKSSSAEGDGPESPPAENQPMQAAINCPHISEAEWVRWHKGRLCLYCGYPGHFARDCPVKPHQALQAGNIQACQ

SEQ ID NO: 3564 - protein, 506 aa, Homo sapiens
MASGDLYEVERIVDKRKNKKGKWEYLIRWKGYGSTEDTWEPEHHLLHCEEFIDEFNGLHMSKDKRIKSGKQSSTSKLLRDSRGPSVEKLSHRPSDPGKSKGTSHKRKRINPPLAKPKKGYSGKPSSGGDRATKTVSYRTTPSGLQIMPLKKSQNGMENGDAGSEKDERHFGNGSHQPGLDLNDHVGEQDMGECDVDHATLAENGLGSALTNGGLNLHSPVKRKLEAEKDYVFDKRLRYSVRQNESNCRFRDIVVRKEEGFTHILLSSQTSDNNALTPEIMKEVRRALCNAATDDSKLLLLSAVGSVFCSGLDYSYLIGRLSSDRRKESTRIAEAIRDFVKAFIQFKKPIVVAINGPALGLGASILPLCDIVWASEKAWFQTPYATIRLTPAGCSSYTFPQILGVALANEMLFCGRKLTAQEACSRGLVSQVFWPTTFSQEVMLRVKEMASCSAVVLEESKCLVRSFLKSVLEDVNEKECLMLKQLWSSSKGLDSLFSYLQDKIYEV

SEQ ID NO: 3565 - protein, 356 aa, Homo sapiens
MLCVNAPPKKAQEGGGSEVFQELKGICIALGMSKPPANITMFQFFSGIEKKLKETLAKVPPNHVGKPLLKKPMGPAHWSQTEKLAKVYQPKRSVLSPKTTISVAHLLAARQDLSKILRTSSGSIREKTACAINKVLMGRVPDRGGRPNEIEPPPPEMPPWQKRQDGPQQQTGGRGGGRGGYEHSSYGGRGGHEQGGGRGGRGGYDHGGRGGGRGNKHQGGWTDGGSGGGGGYQDGGYRDSGFQPGGYHGGHSSGGYQGGGYGGFQTSSSYTGSGYQGGGYQQDNRYQDGGHHGDRGGGRGGRGGRGGRGGRAGQGGGWGGRGSQNYHQGGQFEQHFQHGGYQYNHSGFGQGRHYTS

SEQ ID NO: 3566 - protein, 464 aa, Homo sapiens
MMAAMLSHAYGPGGCGAAAAALNGEQAALLRRKSVNTTECVPVPSSEHVAEIVGRQGCKIKALRAKTNTYIKTPVRGEEPIFVVTGRKEDVAMAKREILSAAEHFSMIRASRNKNGPALGGLSCSPNLPGQTTVQVRVPYRVVGLVVGPKGATIKRIQQQTHTYIVTPSRDKEPVFEVTGMPENVDRAREEIEMHIAMRTGNYIELNEENDFHYNGTDVSFEGGTLGSAWLSSNPVPPSRARMISNYRNDSSSSLGSGSTDSYFGSNRLADFSPTSPFSTGNFWFGDTLPSVGSEDLAVDSPAFDSLPTSAQTIWTPFEPVNPLSGFGSDPSGNMKTQRRGSQPSTPRLSPTFPESIEHPLARRVRSDPPSTGNHVGLPIYIPAFSNGTNSYSSSNGGSTSSSPPESRRKHDCVICFENEVIAALVPCGHNLFCMECANKICEKRTPSCPVCQTAVTQAIQIHS

SEQ ID NO: 3567 - protein, 132 aa, Homo sapiens
MLGWGSSFSVWCSPAPCPHQDLFLKVVHGDVTPYDLVRMSSMQLAPQELARWRDQEEKRGLNIIEQQQKEPCRLPASKMTHKGEVEIQRDMDQTLTLEDLVVKLEPDLVLGRAHAWGSHASPHQQCGLGHVT

SEQ ID NO: 3568 - protein, 138 aa, Homo sapiens [sequence omitted]

SEQ ID NO: 3569 - protein, 824 aa, Homo sapiens
MAKLTNEDSQNRQLQQKLAALSRQIDELEETNRSLRKAEEELQDIKEKISKGEYGNAGIMAEVEELRKRVLDMEGKDEELIKMEEQCRDLNKRLERETLQSKDFKLEVEKLSKRIMALEKLEDAFNKSKQECYSLKCNLEKERMTTKQLSQELESLKVRIKELEAIESRLEKTEFTLKEDLTKLKTLTVMFVDERKTMSEKLKKTEDKLQAASSQLQVEQNKVTTVTEKLIEETKRALKSKTDVEEKMYSVTKERDDLKNKLKAEEEKGNDLLSRVNMLKNRLQSLEAIEKDFLKNKLNQDSGKSTTALHQENNKIKELSQEVERLKLKLKDMKAIEDDLMKTEDEYETLERRYANERDKAQFLSKELEHVKMELAKYKLAEKTETSHEQWLFKRLQEEEAKSGHLSREVDALKEKIHEYMATEDLICHLQGDHSVLQKKLNQQENRNRDLGREIENLTKELERYRHFSKSLRPSLNGRRISDPQVFSKEVQTEAVDNEPPDYKSLIPLERAVINGQLYEESENQDEDPNDEGSVLSFKCSQSTPCPVNRKLWIPWMKSKEGHLQNGKMQTRPNANFVQPGDLVLSHTPGQPLHIKVTPDHVQNTATLEITSPTTESPHSYTSTAVIPNCGTPKQRITILQNASITPVKSKTSTEDLMNLEQGMSPITMATFARAQTPESCGSLTPERTMSPIQVLAVTGSASSPEQGRSPEPTEISAKHAIFRVSPDRQSSWQFQRSNSNSSSVITTEDNKIHIHLGSPYMQAVASPVRPASPSAPLQDNRTQGLINGALNKTTNKVTSSITITPTATPLPRQSQITVSNIYN

SEQ ID NO: 3570 - protein, 173 aa, Homo sapiens [sequence omitted]

SEQ ID NO: 3571 - protein, 100 aa, Homo sapiens
MKGPLVWAGDLGGSFCILSLTLLLSVVSALEPKAVWPGGQSCPQPGSQCSSPQCPVRTWEYEGAHHRVVGMKRGPGGGVLSNVNCHCCCHQLRGYYCPGL

SEQ ID NO: 3572 - protein, 198 aa, Homo sapiens [sequence omitted]

SEQ ID NO: 3573 - protein, 113 aa, Homo sapiens
MKSSSLPSPQCTPLFRAFLLSPPPSPSFFLPVPKDQAMVPSKDTTEPHVDWEAGPGPGPLQHSLSPTGLRQVPCSVYLQPSLPHVFTNSPSAVDPCQPQVRPTHFALDLTGWT

SEQ ID NO: 3574 - protein, 104 aa, Homo sapiens [sequence omitted]

SEQ ID NO: 3575 - protein, 732 aa, Homo sapiens
MDPPSLDTAIQHALAGLYPPFEATAPTVLGQVFRLLDSGFQGDGLSFLLDFLIPAKRLCEQVREAACAPYSHCLFLHEGWPLCLRDEVVVHLAPLNPLLLRQGDFYLQVEPQEEQSVCIMIKCLSLDLCTVDKKPVPEPAYPILFTQEWLEAINSDFEGNPLHNCLVASENGIAPVPWTKITSPEFVDDRPQVVNALCQAWGPLPLEALDLSSPQELHQASSPDNQVLPAQSLAKGKGRTYGSKYPGLIKVEQARCGEVAFRMDEVVSQDFEGDYVALLGFSQESRGESPSREAGTSSGCTSGALEEIAGTKETPLFQKILPLSEANEGPSLGNRACTKPESSEERPYNLGFRRKVNLKAPTHNSERPPQGSYMNVLEDALDCASGLRAGVSQEPAASKMQGPLGNPENMVQLRPGPRQASSPRLSPASPAAAASETKIEVKTKERNGRLPKPMPCPSRNTSSPEPPTPGLKFSFLRGQRQPSVTPEKASLQHNGPWKVLCSLYSPKPNRAKSLGKAGTTQTKTSGPATAPSPLTEEKAALPEASAGSPERGPTLEEEPPGPEPRIGALGVKVFRSRIACLPGGRDRAGRPLLLVSTTEGAWEAPWCTVSEVTKLLSYLCTIPRPEDKAKGLAVLIDARRQPPQPGLVSALQATQAQVPASIRAILFLGEKEAALQLQTLPDVQVEVLTSLKALSHHVDPSQLPAVLEGPFPYCHTEWVHFFQVFTVTAFSP

SEQ ID NO: 3576 - protein, 223 aa, Homo sapiens [sequence omitted]

SEQ ID NO: 3577 - protein, 122 aa, Homo sapiens
MSLLFFASQIQRVHCHLQVTTKHTGLHPQQGYRSNEALAFAPQVNLDSCTREETSRNMLEPTITCFDEAQKKIFNLMEKDSYRRFLKSRFYLDLVNPSSCGAEKQKGAKSSADCASLVPQCA

SEQ ID NO: 3578 - protein, 812 aa, Homo sapiens
MLFPLQVAAVTSSVRDDPLEHCVSPRTRARSPEICKMADNLDEFIEEQKARLAEDKAELESDPPYMEMKGKLSAKLSENSKILISMAKENIPPNSQQTRGSLGIDYGLSLPLGEDYERKKHKLKEELRQDYRRYLTQKNFLSTSETDPSTLGVSLPIGERLSAKERLKLERNKEYNQFLRGKEESSEKFRQVEKSTEPKSQRNKKPIGQVKPDLTSQIQTSCENSEGPRKDVLTPSEAYEELLNQRRLEEDRYRQLDDEIELRNRRIIKKANEEVGISNLKHQRFASKAGIPDRRFHRFNEDRVFDRRYHRPDQDPEVSEEMDERFRYESDFDRRLSRVYTNDRMHRNKRGNMPPMEHDGDVIEQSNIRISSAENKSAPDNETSKSANQDTCSPFAGMLFGGEDRELIQRRKEKYRLELLEQMAEQQRNKRREKDLELRVAASGAQDPEKSPDRLKQFSVAPRHFEEMIPPERPRIAFQTPLPPLSAPSVPPIPSVHPVPSQNEDLRSGLSSALGEMVSPRIAPLPPPPLLPPLATNYRTPYDDAYYFYGSRNTFDPSLAYYGSGMMGVQPAAYVSAPVTHQLAQPVVNTVGQNELKITSDQVINSGLIFEDKPKPSKQSLQSYQEALQQQIREREKRRKKEREEKEEYEAKLEAEMRTYNPWGKGGGGAPLRDAKGNLITDLNRMHRQNIDAYHNPDARTYEDKRAVVSLDPNLATSNAENLEDAANKSSGHMQTQSSPFARGNVFGEPPTELQIKQQELYKNFLRFQIEEKKQREEAERERLRIAEEKEERRLAEQRARIQQEYEEEQEK

SEQ ID NO: 3579 - protein, 575 aa, Homo sapiens
MNTDVLQDTVSSVTATADVIVDLSKSSPSEPSNAVASSSTEQPSVSPSSSVFSQHAIGSSTEVQKDNMKSMKISDELCHPKCTSKVQKVKGKSRSIKKSCCADFECLENSKKDVAFCYSCQLFCQKYFSCGRESFATHGTSNWKKTLEKFRKHEKSEMHLKSLEFWREYQFCDGAVSDDLSIHSKQIEGNKKYLKLIIENILFLGKQCLPLRGNDQSVSSVNKGNFLELLEMRAKDKGEETFRLMNSQVDFYNSTQIQSDIIEIIKTEMLQDIVNEINDSSAFSIICDETINSAMKEQLSICVRYPQKSSKAILIKERFLGFVDTEEMTGTHLHRTIKTYLQQIGVDMDKIHGQAYDSTTNLKIKFNKIAAEFKKEEPRALYIHCYAHFLDLSIIRFCKEVKELRSALKTLSSLFNTICMSGEMLANFRNIYRLSQNKTCKKHISQSCWTVHDRTLLSVIDSLPEIIETLEVIASHSSNTSFADELSHLLTLVSKFEFVFCLKFLYRVLSVTGILSKELQNKTIDIFSLSSKIEAILECLSSERNDVYFKTIWDGTEEICQKITCKGFKVEKPSL

SEQ ID NO: 3580 - protein, 446 aa, Homo sapiens
MHEPSLCANVECPPAHTCPCGVPACSCAHVECPPAHTCRCGVPACSHMPMWSARLLTRAHVECPPAHTRVHVECPPAHVPMWSAHLLTCADVECHLLTHVPMWSARLLTCPCGVPACSHVPMRSARLLTRAHAECPPAHTCPCGVPACSHVPMRSARLLTRADVECPPAHTCPCGVPACSHVPTWSARLITRAHVECSPAHTCRCGVPACSHVPMWSVRLLTRADAECPPAHTCRCGVPACSHVPMWSARLLTCRCGVPACSHVPMWSARLLTCRCGVPACSHVPMWSARLLTRAHVECPPAHTCRRGVPACSRAHMECPPAHTCHCGVPACSHTCRCGVPACSHVPMWSARLLTRAHVECPPAHTRAHVECPPAHTCPCGVPACSHTCPCGVPACSHKALAWWFCRFPVLPAESDAVTVHSTHGGFLIRFYVKDPFYISLHLEIT

SEQ ID NO: 3581 - protein, 141 aa, Homo sapiens
MKEEQMSQAQLFTRSFDDGLGFEYVMFYNDIEKRMVCLFQGGPYLEGPPGFIHGGAIATMIDATVGMCAMMAGGIVMTANLNINYKRPIPLCSVVMINSQLDKVEGRKFFVSCNVQSVDEKTLYSEATSLFIKLNPAKSLT

SEQ ID NO: 3582 - protein, 411 aa, Homo sapiens [sequence omitted]

SEQ ID NO: 3583 - protein, 127 aa, Homo sapiens
MTGLLSPLPIGGWSPGPRETCDPRCRRENFSPEGKSALRDPAPLPSSATDPERSYRMILETAHFRNHVAGVVHWIHHSRLKLTTQDKWTSQQDPDHPTRLILRRDQTAAEDDRPVLVTPEANQPTHG

SEQ ID NO: 3584 - protein, 140 aa, Homo sapiens
MGANGVNEEQNKGARVEKLGKRDPFHLSAWLIYVCFTFSGWCSPEQMADSGGQPQLTQVSAAAVHGMGKGHRIPVALGSALCHTPGPTVPQPQAPALPLTSSHRLPRLFLLPQPGKLTEAFKYFLQGMGYSEYGDKSLLH

SEQ ID NO: 3585 - protein, 159 aa, Homo sapiens [sequence omitted]

SEQ ID NO: 3586 - protein, 175 aa, Homo sapiens
MPKSCAARQCCNRYSSRRKQLTFHRFPFSRPELLKEWVLNIGRGNFKPKQHTVICSEHFRPECFSAFGNRKNLKHNAVPTVFAFQDPTQQVRENTDPASERGNASSSQKEKTSPCRSQVLPEAGAGEDSPGRNMDTALEELQLPPNAEGHVKQAMLFNVENGTPASREALWLSEE

SEQ ID NO: 3587 - protein, 161 aa, Homo sapiens [sequence omitted]

SEQ ID NO: 3588 - protein, 131 aa, Homo sapiens [sequence omitted]

SEQ ID NO: 3589 - protein, 207 aa, Homo sapiens
MLQARNQSPSSQRPLDVLRRNQDPQSPASISVIIFITPKEEPALQEGLHLQDDGLPATAEDAATCLTVLSSQPASCRASCRLRRADGLGVLAHTCEHSTEKWEHSTGNWEHSTGKWEHSTGKRLTALQNGSTVLGNGSTVLGNGSIVLGNGSTVLRNGSTVLGNGSTVLGNGITVLGNGSTVMGNGSTVLGNGSTEYWEMGAQSTGE

SEQ ID NO: 3590 - protein, 464 aa, Homo sapiens [sequence omitted]

SEQ ID NO: 3591 - protein, 131 aa, Homo sapiens [sequence omitted]

SEQ ID NO: 3592 - protein, 493 aa, Homo sapiens
MVPLNIEICALFKSYLLICLWDYATGVILTSEVVQTQGANSLTLLSLADDPSPRLSAQAQVAEDILDKYRNAIKRTSPSDGAMANYESTEVMGDGESAHDSPRDEALQNISADDLPDSASQAAHPQDSAFSYRDAKKKLRLALCSADSVAFPVLTHSTRNGLPDHTDPEDNEIVCFLKVQIAEAINLQDKNLMAQLQETMRCVCRFDNRTCRKLLASIAEDYRKRAPYIAYLTRCRQGLQTTQAHLERLLQRVLRDKEVANRYFTTVCVRLLLESKEKKIREFIQDFQKLTAADDKTAQVEDFLQFLYGAMAQDVIWQNASEEQLQDAQLAIERSVMNRIFKLAFYPNQDGDILRDQVLHEHIQRLSKVVTANHRALQIPEVYLREAPWPSAQSEIRTISAYKTPRDKVQCILRMCSTIMNLLSLANEDSVPGADDFVPVLVFVLIKANPPCLLSTVQYISSFYASCLSGEESYWWMQFTAAVEFIKTIDDRK

SEQ ID NO: 3593 - protein, 156 aa, Homo sapiens [sequence omitted]

SEQ ID NO: 3594 - protein, 134 aa, Homo sapiens [sequence omitted]

SEQ ID NO: 3595 - protein, 454 aa, Homo sapiens
MSPHRLLMSPHYSLVSPHHLLMSPHRLLMSPHYSLVSPHRLLMSPHYSPMSPHRLLMSPHYSLVSPHRLLMSPLLSGVPSPPSDVPSLLSGVPSLPSDVSSPPSDVPSLLSDVPSLLSGVPSPPSDVPSPPSDVPSPPSDVPSLLSGVPSPPSDVPSPPSDVPSPPSDVPLLSDVPSPPSDVPLLSDVPSPPSDVPSLPSDVPSLSGVPSPPSDVPSLLSGVPSPPSDISPPSDVPSLLSDVPSLPSDVPSLLSGVPSPPSDVPSLLSDVPSPPSDVPSPPSDIPLLSGVPPPPSDVPSPPSDVPSPPSDVPLLSGVPSPLSDVPLLSGVPSPPSDVPSLLMSPHRLLMSHYSLVSPHRLDVPSLLSDVPSLLSGVPSSPSGVPSLPSGVPILSGVPSLPSGVPSPSGVPITLWCPLTTLWCPLSTLWRPFTALWCPLNTLRCPLIALWCPITL

SEQ ID NO: 3596 - protein, 253 aa, Homo sapiens
MGTHPVGQTEGWMDGWTGWRPLPWGTHPAGWTEGRMDGWTGWRPLLWGTHPTGQTKDGWTAGQAGGPCHGHSPRGTDRRTDGRLDRLEAPSMGHSPRATDRRTDGRLDGPEAPAVDTHPAGQTEGRMDGWTGWRPLPWTLTPQDRQKDGWTAGQAGGPCRGRSPRSCWASVGSWEISTAVQCAGRAFVLSSQRPRLRLCCIWPPAGQAPSEEGLLRVCGSRRPSSVCDSHPPPTPAHFWEHLPGGFGGPSILP

SEQ ID NO: 3597 - protein, 122 aa, Homo sapiens [sequence omitted]

SEQ ID NO: 3598 - protein, 696 aa, Homo sapiens [sequence omitted]

SEQ ID NO: 3599 - protein, 117 aa, Homo sapiens [sequence omitted]

SEQ ID NO: 3600 - protein, 112 aa, Homo sapiens
MGSLTFRDVAIEFSLEEWQCLDTAQQNLYRNVMLENYRNLVFLGIAAFKPDLIIFLEEGKESWNMKRHEMVEESPGMVGSSGPESSTPYHVHCCPFVLSLRLVSETHQLFLS

SEQ ID NO: 3601 - protein, 100 aa, Homo sapiens [sequence omitted]

SEQ ID NO: 3602 - protein, 123 aa, Homo sapiens [sequence omitted]

SEQ ID NO: 3603 - protein, 615 aa, Homo sapiens
MAPPGSSTVFLLALTIIASTWALTPTHYLTKHDVERLKASLDRPFTNLESAFYSIVGLSSLGAQVPDAKISISNETKDLLLAAVSEDSSVTQIYHAVAALSGFGLPLASQEALSALTARLSKEETVLATVQALQTASHLSQQADLRSIVEEIEDLVARLDELGGVYLQFEEGLETTALFVAATYKLMDHVGTEPSIKEDQVIQLMNAIFSKKNFESLSEAFSVASAAAVLSHNRYHVPVVVVPEGSASDTHEQAILRLQVTNVLSQPLTQATVKLEHAKSVASRATVLQKTSFTPVGDVFELNFMNVKFSSGYYDFLVEVEGDNRYIANTVELRVKISTEVGITNVDLSTVDKDQSIAPKTTRVTYPAKAKGTFIADSHQNFALFFQLVDVNTGAELTPHQTFVRLHNQKTGQEVVFVAEPDNKNVYKFELDTSERKIEFDSASGTYTLYLIIGDATLKNPILWNVADVVIKFPEEEAPSTVLSQNLFTPKQEIQHLFREPEKRPPTVVSNTFTALILSPLLLLFALWIRIGANVSNFTFAPSTIIFHLGHAAMLGLMYVYWTQLNMFQTLKYLAILGSVTFLAGNRMLAQQAVKRIAAEQSSRLAKYRTLRTAH

SEQ ID NO: 3604 - protein, 180 aa, Homo sapiens
MDWRPGETDEGWHSQGILEEVQREPREARPPVHLPHRIHLMAGRVPQGADRIAVKAEMEAVFLENLRHAAGVLAQEDLVGLLEPINTRITDPQYFLDTPQQAAAILQKVGRPNLQLQMDIFHWQIMDGNLTGNIREFLPIVGHVQVAQVPGRGEPSSPGELNFPYLFQLLEDEGYKGFVG

SEQ ID NO: 3605 - protein, 115 aa, Homo sapiens
MWLLFQCHTCYCFQPRNLYPCLSETSQLPCSLRLFFFFFFFFETESRSVAQAGGQWHDLSSLQAPTPGFTPFSCLSLPSSWDYRCPPPCPANFFVFLVETGFHHVSRDGLDLLTS

SEQ ID NO: 3606 - protein, 467 aa, Homo sapiens
MMHALEVLNSQETGPTLPRQNSQLPAQVQNGPSQEELEIQRRQLQEQQRQKELERERLERERMERERLERERLERERLERERLEQEQLERERQERERQERLERQERLERQERLERQERLDRERQERQERERLERLERERQERERQEQLEREQLEWERERRISSAAAPASVETPLNSVLGDSSASEPGLQAASQPAETPSQQGIVLGPLAPPPPPPLPPGPAQASVALPPPPGPPPPPPLPSTGPPPPPPPPPLPNQVPPPPPPPPAPPLPASGFFLASMSEDNRPLTGLAAAIAGAKLRKVSRMEDTSFPSGGNAIGVNSASSKTDTGRGNGPLPLGGSGLMEEMSALLARRRRIAEKGSTIETEQKEDKGEDSEPVTSKASSTSTPEPTRKPWERTNTMNGSKSPVISRPKSTPLSQPSANGVQTEGLDYDRLKQDILDEMRKELTKLKEELIDAIRQELSKSNTA

SEQ ID NO: 3607 - protein, 236 aa, Homo sapiens [sequence omitted]

SEQ ID NO: 3608 - protein, 111 aa, Homo sapiens [sequence omitted]

SEQ ID NO: 3609 - protein, 369 aa, Homo sapiens
MEVSPWSCLQKQAAWGRSVVDFFLVITQLGFCSVYIVFLAENVKQVHEGFLESKVFISNSTNSSNPCERRSVDLRIYMLCFLPFIILLVFIRELKNLFVLSFLANVSMAVSLVIIYQYVVRNMPDPHNLPIVAGWKKYPLFFGTAVFAFEGIGVVLPLENQMKESKRFPQALNIGMGIVTTLYVTLATLGYMCFRDEIKGSITLNLPQDVWLYQSVKILYSFGIFVTYSIQFYVPAEIIIPGITSKFHTKWKQICEFGIRSFLVSITCAGAILIPRLDIVISFVGAVSSSTLALILPPLVEILTFSKEHYNIWMVLKNISIAFTGVVGFLLGTYITVEEIIYPTPKVVAGTPQSPFLNLNSTCLTSGLK

SEQ ID NO: 3610 - protein, 802 aa, Homo sapiens
MYRSTKGASKARRDQINAEIRNLKELLPLAEADKVRLSYLHIMSLACIYTRKGVFFAGGTPLAGPTGLLSARELEDIVAALPGFLLVFTAEGKLLYLSKSVSEHLGHSMVDLVAQGDSIYDIIDPADHLTVRQQLTLPSALDTDRLFRCRFNTSKSLRRQSAGNKLVLIRGRFHAHPPGAYWAGNPVFTAFCAPLEPRPRPGPGPGPGPASLFLAMFQSRHAKDLALLDISESVLIYLGFERSELLCKSWYGLLHPEDLAHASAQHYRLLAESGDIQAEMVVRLQAKTGGWAWIYCLLYSEGPEGPITANNYPISDMEAWSLRQQLNSEDTQAAYVLGTPTMLPSFPENILSQEECSSTNPLFTAALGAPRSTSFPSAPELSVVSASEEHPRPSKELDFSYLTFPSGPEPSLQAELSKDLVCTPPYTPHQPGGCAFLFSLHEPFQTHLPTPSSTLQEQLTPSTATFSDQLTPSSATFPDPLTSPLQGQLTETSVRSYEDQLTPCTSTFPDQLLPSTATFPEPLGSPAHEQLTPPSTAFQAHLDSPSQTFPEQLSPNPTKTYFAQEGCSFLYEKLPPSPSSPGNGDCTLLALAQLRGPLSVDVPLVPEGLLTPEASPVKQSFFHYSEKEQNEIDRLIQQISQLAQGMDRPFSAEAGTGGLEPLGGLEPLDSNLSLSGAGPPVLSLDLKPWKCQELDFLADPDNMFLEETPVEDIFMDLSTPDPSEEWGSGDPEAEGPGGAPSPCNNLSPEDHSFLEDLATYETAFETGVSAFPYDGFTDELHQLQSQVQDSFHEDGSGGEPTF

SEQ ID NO: 3611 - protein, 106 aa, Homo sapiens [sequence omitted]

SEQ ID NO: 3612 - protein, 178 aa, Homo sapiens
MKSISFSFGSGGEAAPGRQRANPSVCERERKKEIERQTETERQRYRDRKRETDRDRKRETETERQEQREVFWIRWLRGGRTSLQLQLRWTEQRVETHIVNFCSKTYRKNILGKPRESTDPLKELMTAAGSLRCRKPVSWLAFSTWRLVVWGKFSALITTCLEIDSVLLGGHSGSETSL

SEQ ID NO: 3613 - protein, 135 aa, Homo sapiens [sequence omitted]

SEQ ID NO: 3614 - protein, 115 aa, Homo sapiens [sequence omitted]

SEQ ID NO: 3615 - protein, 325 aa, Homo sapiens
MGTRSAIAAPRILCSRGLRSGSARATGSGVERSPSAANPTLMTSLRTWPLPWALPSPTCLGPPIPPRRQRIFSFEINVSVAIITFASEPKVLMSVLNDNSRDMTEVISSLENANYKDHENGTGTNTYAALNSVYLMMNNQMRLLGMETMAWQEIRHAIILLTDGKSNMGGSPKTAVDHIREILNINQKRNDYLDIYAIGVGKLDVDWRELNELGSKKDGERHAFILQDTKALHQVFEHMLDVSKLTDTICGVGNMSANASDQERTPWHVTIKPKSQETCRGALISDQWVLTAAHCFRDGNDHSLWRVNVGDPKSQWGKEFLIEKA

SEQ ID NO: 3616 - protein, 133 aa, Homo sapiens
MITPLASAETNEDMAVVWKLLREGNVNIQATQGGQTALMLGVSHDREDMVQALLSCQADVNLQDHDGSSALMLACHHGNVDLVRLLLAHPACDSSLTDKAGRTALSIALKSPTHMEIAGLLRAHAEQGRSLGL

SEQ ID NO: 3617 - protein, 198 aa, Homo sapiens [sequence omitted]

SEQ ID NO: 3618 - protein, 110 aa, Homo sapiens [sequence omitted]

SEQ ID NO: 3619 - protein, 111 aa, Homo sapiens
MPRSAPADAASSGVGKAWPAQLGTQMGHTLRGPFPAVIKLPFPRMLTKMGSPHEKSHSVFLKAHRRSIFFSMFASRVFFDRLWSAQVPVSPKLWSWDLESHLERGLVLLST

SEQ ID NO: 3620 - protein, 161 aa, Homo sapiens
MAEPTGLLEMSELPGDSSVPQVGTASGVSDVLRGAVGGGVRVQEAREGPVAEAARSMARMPGPVPGPIPSSVPGLASAPDPHQQLAFLEINRQLLFREYLDGSSMIPVRLLRDFEERRRLFVEGCKAREAAFDADPPQMDFAAVAFTVALTASEALSPLAD

SEQ ID NO: 3621 - protein, 490 aa, Homo sapiens [sequence omitted]

SEQ ID NO: 3622 - protein, 369 aa, Homo sapiens [sequence omitted]

SEQ ID NO: 3623 - protein, 153 aa, Homo sapiens [sequence omitted]

SEQ ID NO: 3624 - protein, 141 aa, Homo sapiens
MHLSVWEKPMDLKDRGDLNRIIEDPPHKRKLEAPATDNSDGSSSEDNREDQDVKTKRNRTEGCGSPKPEEAKREDKGTRTPPPQILLPLEERVTHFRDMLLERGVSAFSTWEKELHKIVFDPRYLLLNSEERKQIFEQFVK

SEQ ID NO: 3625 - protein, 136 aa, Homo sapiens
MEQLSDEEIDHGAEEDSDKEDQDLDKMFGAWLGELDKLTQSLDSDKPMEPVKRSPLRQETNMANFSYRFSIYNLNEALNQGETVDLDALMADLCSIEQELSSIGSGNSKRQITETKATGATRTLADCSLVVISSGY

SEQ ID NO: 3626 - protein, 605 aa, Homo sapiens
MAGPGPTFPLHRLVWANRHRELEAALHSHQHDIEQEDPRGRTPLELAVSLGNLESVRVLLRHNANVGKENRQGWAVLQEAVSTGDPEMVQLVLQYRDYQRATQRLAGIPELLNKLRQAPDFYVEMKWEFTSWVPLVSKMCPSDVYRVWKRGESLRVDTSLLGFEHMTWQRGRRSFIFKGQEAGALVMEVDHDRQVVHVETLGLTLQEPETLLAAMRPSEEHVASRLTSPIVSTHLDTRNVAFERNKCGIWGWRSEKMETVSGYEAKVYSATNVELVTRTRTEHLSDQDKSRSKAGKTPFQSFLGMAQQHSSHTGAPVQQAASPTNPTAISPEEYFDPNFSLESRNIGRPIEMSSKVQRFKATLWLSEEHPLSLGDQVTPIIDLMAISNAHFAKLRDFITLRLPPGFPVKIEIPLFHVLNARITFSNLCGCDEPLSSVWVPAPSSAVAASGNPFPCEVDPTVFEVPNGYSVLGMERNEPLRDEDDDLLQFAIQQSLLEAGTEAEQVTVWEALTNTRPGARPPPQATVYEEQLQLERALQESLQLSTEPRGPGSPPRTPPAPGPPSFEEQLRLALELSSREQEERERRGQQEEEDLQRILQLSLTEH

SEQ ID NO: 3627 - protein, 579 aa, Homo sapiens
MSALRPLLLLLLPLCPGPGPGPGSEAKVTRSCAETRQVLGARGYSLNLIPPALISGEHLRVCPQEYTCCSSETEQRLIRETEATFRGLVEDSGSFLVHTLAARHRKFDEFFLEMLSVAQHSLTQLFSHSYGRLYAQHALIFNGLFSRLRDFYGESGEGLDDTLADFWAQLLERVFPLLHPQYSFPPDYLLCLSRLASSTDGSLQPFGDSPRRLRLQITRTLVAARAFVQGLETGRNVVSEALKVPVSEGCSQALMRLIGCPLCRGVPSLMPCQGFCLNVVRGCLSSRGLEPDWGNYLDGLLILADKLQGPFSFELTAESIGVKISEGLMYLQENSAKVSAQVFQECGPPDPVPARNRRAPPPREEAGRLWSMVTEEERPTTAAGTNLHRLVWELRERLARMRGFWARLSLTVCGDSRMAADASLEAAPCWTGAGRGRYLPPVVGGSPAEQVNNPELKVDASGPDVPTRRRRLQLRAATARMKTAALGHDLDGQDADEDASGSGGGQQYADDWMAGAVAPPARPPRPPYPPRRDGSGGKGGGGSARYNQGRSRSGGASIGFHTQTILILSLSALALLGPR

SEQ ID NO: 3628 - protein, 340 aa, Homo sapiens
MHTDLDTDMDMDTETTALCPSGSRRASPPGTPTPEADATLLKKSEKLLAELDRSGLPSAPGAPRRRGSMPVPYKHQLRRAQAVDELDWPPQASSSGSSDSLGSGEAAPAQKDGIFKVMLVGESGVGKSTLAGTFGGLQGDSAHEPENPEDTYERRIMVDKEEVTLVVYDIWEQGDAGGWLRDHCLQTGDAFLIVFSVTDRRSFSKVPETLLRLRAGRPHHDLPVILVGNKSDLARSREVSLEEGRHLAGTLSCKHIETSAALHHNTRELFEGAVRQIRLRRGRNHAGGQRPDPGSPEGPAPPARRESLTKKAKRFLANLVPRNAKFFKQRSRSCHDLSVL

SEQ ID NO: 3629 - protein, 308 aa, Homo sapiens [sequence omitted]

SEQ ID NO: 3630 - protein, 193 aa, Homo sapiens
MEHLCATMDLLTQPFCAPWELPLCDSPLDPPPQRLTHLPAALHRKLLIDSHFLIPPRFSPRLPPETALTRPHLARHGGPLEFLCLLGLCSPQGILCHSSTQLLNLGAPELSRAHRLPRELGQLLAPPDLCDPTSSGCPDLCDPTSRGSPDLCDPTSSGSSDLCAPTSSGSPDLCAPTSSGSPDLCAPTSSGSP

SEQ ID NO: 3631 - protein, 260 aa, Homo sapiens
MMDPCSVGVQLRTTNECHKTYYTRHTGFKTLQELSSNDMLLLQLRTGMTLSGNNTICFHHVKIYIDRFEDLQKSCCDPFNIHKKLAKKNLHVIDLDDATFLSAKFGRQLVPGWKLCPKCTQIINGSVDVDTEDRQKRKPESDGRTAKALRSLQFTNPGRQTEFAPETGKREKRRLTKNATAGSDRQVIPAKSKVYDSQGLLIFSGMDLCDCLDEDCLGCFYACPACGSTKCGAECRCDRKWLYEQIEIEGGEIIHNKHAG

SEQ ID NO: 3632 - protein, 130 aa, Homo sapiens
MEEEEIRTWSFPEEVWQVATQPDSQQQHEDQHLSHTFLDKKDWTGNELHECNELGKKLHQNPNLLPSKQQVRTRDLCRKSLMCNLDFTPNAYLARRRFQCDGHGNFFSVRNLKLHLQERIHAEVTSVEVL

SEQ ID NO: 3633 - protein, 799 aa, Homo sapiens [sequence omitted]

SEQ ID NO: 3634 - protein, 195 aa, Homo sapiens
MSSCSNVCGSRQAQAAAEGGYQRYGVRSYLHQFYEDCTASIWEYEDDFQIQRSPNRWSSVFWKVGLISGTVFVILGLTVLAVGFLVPPKIEAFGEADFVVVDTHAVQFNSALDMYKLAGAVLFCIGGTSMAGCLLMSVFVKSYSKEEKFLQQKFKERIADTKAHTQPVTKAPGPGETKIPVTLSRVQNVQPLLAT

SEQ ID NO: 3635 - protein, 223 aa, Homo sapiens
MPSSHHSIQHSIEVLARAIGQEKDKKHILIGRERVKLSLFADNMIVYLENPIVSPQKLLRLVSNFSKVSGYKINVLKSQAFLYTNNRQAGSQIMNEVPFTIATKRIKYLGIQLTRDVKDLFKENYKLLLKEIREDTNKWKNIPSSWIGRINIMKMAILSNVIYRFNAILIKLPLTFFTELEKKTTLNFIWNQRRPCIAKTSLSKKNKAGGIKLPDFKLYYRLQ

SEQ ID NO: 3636 - protein, 385 aa, Homo sapiens
MWGFRLLRSPPLLLLLPQLGIGNASSCSQARTMNPGGSGGARCSLSAEVRRRQCLQLSTVPGADPQRSNELLLLAAAGEGLERQDLPGDPAKEEPQPPPQHHVLYFPGDVQNYHEIMTRHPENYQWENWSLENVATILAHRFPNSYIWVIKCSRMHLHKFSCYDNFVKSNMFGAPEHNTDFGAFKHLYMLLVNAFNLSQNSLSKKSLNVWNKDSIASNCRSSPSHTTNGCQGEKVRTCEKSDESAMSFYPPSLNDASFTLIGFSKGCVVLNQLLFELKEAKKDKNIDAFIKSIRTMYWLDGGHSGGSNTWVTYPEVLKEFAQTGIIVHTHVTPYQVRDPMRSWIGKEHKKFVQILGDLGMQVTSQIHFTKEAPSIENHFRVHEVF

SEQ ID NO: 3637 - protein, 172 aa, Homo sapiens
MASRERLFELWMLYCTKKDPDYLKLWLDTFVSSYEQFLDVDFEKLPTRVDDMPPGISLLPDNILQVLRIQLLQCVQKMADGLEEQQQALSILLVKFFIILCRNLSNVEEIGTCSYINYVITMTTLYIQQLKSKKKEKEMADQTCIEEFVIHALAFCESLYDPYRNWRHRISG

SEQ ID NO: 3638 - protein, 237 aa, Homo sapiens; identical to SEQ ID NO: 3200

SEQ ID NO: 3639 - protein, 681 aa, Homo sapiens [sequence omitted]

SEQ ID NO: 3640 - protein, 429 aa, Homo sapiens
MSRDPGSGGWEEAPRAAAALCTLYHEAGQRLRRLQDQLAARDALIARLRARLAALEGDAAPSLVDALLEQVARFREQLRRQEGGAAEAQMRQEIERLTERLEEKEREMQQLLSQPQHEREKEVVLLRRSMAEGERARAASDVLCRSLANETHQLRRTLTATAHMCQHLAKCLDERQHAQRNVGERSPDQSEHTDGHTSVQSVIEKLQEENRLLKQKVTHVEDLNAKWQRYNASRDEYVRGLHAQLRGLQIPHEPELMRKEISRLNRQLEEKINDCAEVKQELAASRTARDAALERVQMLEQQILAYKDDFMSERADRERAQSRIQELEEKVASLLHQVSWRQDSREPDAGRIHAGSKTAKYLAADALELMVPGGWRPGTGSQQPEPPAEGGHPGAVQRGQGDLQCPHCLQCFSDEQGEELLRHVAECCQ

SEQ ID NO: 3641 - protein, 262 aa, Homo sapiens [sequence omitted]

SEQ ID NO: 3642 - protein, 339 aa, Homo sapiens
MTEGVKTLGWTKQKGGCHWGRSEGAGESGKSTIVKQMKIIHEDGYSEEECRQYRAVVYSNTIQSIMAIVKAMGNLQIDFADPSRADDARQLFALSCTAEEQGVLPDDLSGVIRRLWADHGVQACFGRSREYQLNDSAAYYLNDLERIAQSDYIPTQQDVLRTRVKTTGIVETHFTFKDLHFKMFDVGGQRSERKKWIHCFEGVTAIIFCVALSAYDLVLAEDEEMNRMHESMKLFDSICNNKWFTDTSIILFLNKKDLFEEKITHSPLTICFPEYTGANKYDEAASYIQSKFEDLNKRKDTKEIYTHFTCATDTKNVQFVFDAVTDVIIKNNLKDCGLF

SEQ ID NO: 3643 - protein, 492 aa, Homo sapiens
MNRGGGSPSAAANYLLCTNCRKVLRKDKRIRVSQPLTRGPSAFIPEKEVVQANTVDERTNFLVEEYSTSGRLDNITQVMSLHTQYLESFLRSQFYMLRMDGPLPLPYRHYIAIMAAARHQCSYLINMHVDEFLKTGGIAEWLNGLEYVPQRLKNLNEINKLLAHRPWLITKEHIQKLVKTGENNWSLPELVHAVVLLAHYHALASFVFGSGINPERDPEISNGFRLISVNNFCVCDLANDNNIENASLSGSNFGIVDSLSELEALMERMKRLQEEREDEEASQEEMSTRFEKEKKESLFVVSGDTFHSFPHSDFEDDMIITSDVSRYIEDPGFGYEDFARRGEEHLPTFRAQDYTWENHGFSLVNRLYSDIGHLLDEKFRMVYNLTYNTMATHEDVDTTMLRRALFNYVHCMFGIRYDDYDYGEVNQLLERSLKVYIKTVTCYPERTTKRMYDSYWRQFKHSEKVHVNLLLMEARMQAELLYALRAITRHLT

SEQ ID NO: 3644 - protein, 660 aa, Homo sapiens
MKVTLSALDTSESSFTPLVVIELAQDVKEETKEWLKNRIIAKKKDGGAQLLFRPLLNKYEQETLENQNLYLVGASKIRMLLGAEAVGLVKECNDNTMRAFTYRTRQNFKGFDDNNDDFLTMAECQFIIKHELENLRAKDEKMIPGYPQAKLYPGKSLLRRLLTSGIVIQVFPLHDSEALKKLEDTWYTRFALKYQPIDSIRGYFGETIALYFGFLEYFTFALIPMAVIGLPYYLFVWEDYDKYVIFASFNLIWSTVILELWKRGCANMTYRWGTLLMKRKFEEPRPGFHGVLGINSITGKEEPLYPSYKRQLRIYLVSLPFVCLCLYFSLYVMMIYFDMEVWALGLHENSGSEWTSVLLYVPSIIYAIVIEIMNRLYRYAAEFLTSWENHRLESAYQNHLILKVLVFNFLNCFASLFYIAFVLKDMKLLRQSLATLLITSQILNQIMESFLPYWLQRKHGVRVKRKVQALKADIDATLYEQVILEKEMGTYLGTFDDYLELFLQFGYVSLFSCVYPLAAAFAVLNNFTEVNSDALKMCRVFKRPFSEPSANIGVWQLAFETMSVISVVTNCALIGMSPQVNAVFPESKADLILIVVAVEHALLALKFILAFAIPDKPRHIQMKLARLEFESLEALKQQQMKLVTENLKEEPMESGKEKAT

SEQ ID NO: 3645 - protein, 229 aa, Homo sapiens
MFAIQPGLAEGGQFLGDPPPGLCQPELQPDSNSNFMASAKDANENWHGMPGRVEPILRRSSSESPSDNQAFQAPGSPEEGVRSPPEGAEIPGAEPEKMGGAGTVCSPLEDNGYASSSLSIDSRSSSPEPACGTPRGPGPPDPLLPSVAQAVQHLQVQERYKEQEKEKHHVHLVMYRRLALLQWIRGLQHQLIDQQARLQESFDTILDNRKELIRCLQQRAAPSRPQDQA

SEQ ID NO: 3646 - protein, 458 aa, Homo sapiens [sequence omitted]

SEQ ID NO: 3647 - protein, 200 aa, Homo sapiens
MGRLHCTEDPVPEAVGGDMQQLNQLGAQQFSALTEVLFHFLTEPKEVERFLAQLSEFATTNQISLGSLRSIVKSLLLVPNGALKKSLTAKQVQADFITLGLSEEKATYFSEKWKQNAPTLARWAIGQTLMINQLIDMEWKFGVTSGSSELEKVGSIFLQLKLVVKKGNQTENVYIELTLPQFYSFLHEMERVRTSMECFC

SEQ ID NO: 3648 - protein, 350 aa, Homo sapiens
MNLRGLFQDFNPSKFLIYACLLLFSVLLALRLDGIIQWSYWAVFAPIWLWKLMVIVGASVGTGVWARNPQYRAEGETCVEFKAMLIAVGIHLLLLMFEVLVCDRIERGSHFWLLVFMPLFFVSPVSVAACVWGFRHDRSLELEILCSVNILQFIFIALRLDKIIHWPWLVVCVPLWILMSFLCLVVLYYIVWSVLFLRSMDVIAEQRRTHITMALSWMTIVVPLLTFEILLVHKLDGHNAFSCIPIFVPLWLSLITLMATTFGQKGGNHWWFGIRKDFCQFLLEIFPFLREYGNISYDLHHEDNEETEETPVPEPPKIAPMFRKKARVVITQSPGKYVLPPPKLNIEMPD

SEQ ID NO: 3649 - protein, 333 aa, Homo sapiens
MLCRLGGRWLRPLPALQLWARDLPLAPVPTSGAKRPTLPVWAVAPVSAVHANGWYEALAASSPVRVAEEVLLGVHAATGLPWWGSILLSTVALRGAVTLPLAAYQHYILAKVENLQPEIKTIARHLNQEVAVRANQLGWSKRDARLTYLKNMRRLISELYVRDNCHPFKATVLVWIQLPMWIFMSFALRNLSTGAAHSEGFSVQEQLATGGILWFPDLTAPDSTWILPISVGVINLLIVEICALQKIGMSRFQTYITYFVRAMSVLMIPIAATVPSSIVLYWLCSSFVGLSQNLLLRSPGFRQLCRIPSTKSDSETPYKDIFAAFNTKFISRK

SEQ ID NO: 3650 - protein, 824 aa, Homo sapiens
MHHGTGPQNVQHQLQRSRACPGSEGEEQPAHPNPPPSPAAPFAPSASPSAPQSPSYQIQQLMNRSPATGQNVNITLQSVGPVVGGNQQITLAPLPLPSPTSPGFQFSAQPRRFEHGSPSYIQVTSPLSQQVQTQSPTQPSPGPGQALQNVRAGAPGPGLGLCSSSPTGGFVDASVLVRQISLSPSSGGHFVFQDGSGLTQIAQGAQVQLQHPGTPITVRERRPSQPHTQSGGTIHHLGPQSPAAAGGAGLQPLASPSHITTANLPPQISSIIQGQLVQQQQVLQGPPLPRPLGFERTPGVLLPGAGGAAGFGMTSPPPPTSPSRTAVPPGLSSLPLTSVGNTGMKKVPKKLEEIPPASPEMAQMRKQCLDYHYQEMQALKEVFKEYLIELFFLQHFQGNMMDFLAFKKKHYAPLQAYLRQNDLDIEEEEEEEEEEEEKSEVINDEQALAGSLVAGAGSTVETDLFKRQQAMPSTGMAGGMPPTPQAAQLAGQRQSQQQYDPSTGPPVQNAASLHTPLPQLPGRLPPAGVPTAALSSALQFAQQPQVVEAQTQLQIPVKTQQPNVPIPAPPSSQLPIPPSQPAQLALHVPTPGKVQVQASQLSSLPQMVASTRLPVDPAPPCPRPLPTSSTSSLAPVSGSGPGPSPARSSPVNRPSSATNKALSPVTSRTPGVVASAPTKPQSPAQNATSSQDSSQDTLTEQITLENQVHQRIAELRKAGLWSQRRLPKLQEAPRPKSHWDYLLEEMQWMATDFAQERRWKVAAAKKLVRTVVRHHEEKQLREERGKKEEQSRLRRIAASTAREIECFWSNIEQVVEIKLRVELE

SEQ ID NO: 3651 - protein, 160 aa, Homo sapiens
MAFTFAAFCYMLSLVLCAALIFFAIWHIIAFDELRTDFKSPIDQCNPVHARERLRNIERICFLLRKLVLPEYSIHSLFCIMFLCAQEWLTLGLNVPLLFYHFWRYFHCPADSSELAYDPPVVMNADTLSYCQKEAWCKLAFYLLSFFYYLYCMIYTLVSS

SEQ ID NO: 3652 - protein, 100 aa, Homo sapiens
MTDLLSPLPAILGPRGQERPGIQGVPQLSFTRIYRPALPTSQHPAWQRNGTEDGAAGRYQHFRNCDRILLRCQGWSALVQSRLTANSASQVQVILLCQFL

SEQ ID NO: 3653 - protein, 101 aa, Homo sapiens
MFLGLVGLRTKGRRWISSWSEGEDRGQSPEGVLLTWVFGTKCVMHPCEETTKQALCEQQGCLFHLGADELSPKRESAQSISFKWENSIYLHATLFLIVPLG

SEQ ID NO: 3654 - protein, 382 aa, Homo sapiens
MQNGLNGQVDVSLASAASAVESLKPALLAGQPLVYVPSASLFMLYGSLQEGPASGSGSERDDRSSEAPATVELSSAPSAQKRLCEERKPQEEDEPATKRQSREYEDGPLSLVMPKKPSDSTDLASPKTMGNRASIPLKDIHVNGQLPAAEEISGKATANSLVSSEWGNPSRNTDVEKPSKENESTKEPSLLQYLCVQSPAGLNGFNVLLSGSQTPPTVGPSSGQLPSFSVPCMVLPSPPLGPFPVLYSPAMPGPVSSTLGSIAQLLVGPTAVVNPKSSTLPSADPQLQSQPSLNLSPVMSRSHSVVQQPESPVYVGHPVSVVKLHQSPVPVTPKSIQRTHRETFFKTPGSLGDPVLKRRERNQSRNTSSAQRRLEIPSGGAD

SEQ ID NO: 3655 - protein, 166 aa, Homo sapiens [sequence omitted]

SEQ ID NO: 3656 - protein, 304 aa, Homo sapiens
MSSIKHLVYAVIRFLREQSQMDTYTSDEQESLEVAIQCLETVFKISPEDTHLAVSQPLTEMFTSSFCKNDVLPLSNSVPEDVGKADQLKDEGNNHMKEENYAAAVDCYTQAIELDPNNAVYYCNRAAAQSKLGHYTDAIKDCEKAIAIDSKYSKAYGRMGLALTALNKFEEAVTSYQKALDLDPENDSYKSNLKIAEQKLREVSSPTGTGLSFDMASLINNPAFISMAASLMQNPQVQQLMSGMMTNAIGGPAAGVGGLTDLSSLIQAGQQFAQQIQQQNPELIEQLRNHIRSRSFSSSAEEHS

SEQ ID NO: 3657 - protein, 271 aa, Homo sapiens
MYIGQVAKDVLKWPRPSSPPVVKLEKRLIAEYGMPSTHAMAATAIAFTLLISTMDRYQYPFVLGLVMAVVFSTLVCLSRLYTGMHTVLDVLGGVLITALLIVLTYPAWTFIDCLDSASPLFPVCVIVVPFFLCYNYPVSDYYSPTRADTTTILAAGAGVTIGFWINHFFQLVSKPAESLPVIQNIPPLTTYMLVLGLTKFAVGIVLILLVRQLVQNLSLQVLYSWFKVVTRNKEARRRLEIEVPYKFVTYTSVGICATTFVPMLHRFLGLP

SEQ ID NO: 3658 - protein, 144 aa, Homo sapiens
MHALPSWSASVSPSVSLDSDAPSVRRSPALGPWSLRLITRGCRDGRGRVWRGQGPLRPSLRKEWRNPKTGPWRPSCKVGRRAGRQDLGRAWGAGPPEGGGGGSATRTMVRLVQPPGPHLLPEVGLCSAPWCGLVHRRRSVNTCG

SEQ ID NO: 3659 - protein, 307 aa, Homo sapiens
MNSWMPRGAPGRMWSACSSSTTPPCPRTSISPQRTGQKLWGCFWEQWCRSSSAWMPRSAAGRKVKKEPGLAAEVGSALKAETPNNWNATEDQHEPTKPLVRRAGAKSRSRRKKQKKNSRQEAVPWKKPKGINSNSTANLEDPEVGDAESMAISEPIKGSRKPCVNKEELALKKPMAKCAWKGPREPPQDARAEAESPGGASESDQDGGHESPPKKKAVAWVSAKNPAPMRKKKKVSLGPVSYVLVDSEDGRKKPVMPKKGPGSRREASDQKAPRGQQPAEATASTSRGPKAKPEGSPRRATNESRKV

SEQ ID NO: 3660 - protein, 231 aa, Homo sapiens [sequence omitted]

SEQ ID NO: 3661 - protein, 391 aa, Homo sapiens
MLKSNDCLFSLENLFFEKPDEVENHPDNEKSLDWFLPPAPLISEIPDTQELEEELESHKLLGQEKRPKMLTSNLKITNEDTNYISLTQKFQFAFPSDKYEQDDLNLEGVGNNDLPHVAGKLTYASQKYKNHIGTEIAPEKSVPDDTKLVNFAEDKGESTSVFRKRLFKISDNIHGSAYSNDNELDSHIGSVKIVQTEMNKGKSRNYSNSKQKFQYSANVFTANNAFSASEIGEGMFKAPSFSVAFQPHDIQEVTENGLGSLKAVTEIPAKFRSIFKEFPYFNYIQSKAFDDLLYTDRNFVICAPTGSGKTVVFELAITRLLMEVPLPWLNIKIVYMAPIKALCSQRFDDWKEKFGPIGLNCKELTGDTVMDDLFEIQHAHIIMTTPVGKMG

SEQ ID NO: 3662 - protein, 358 aa, Homo sapiens
MATFPCQLCGKTFLTLEKFTIHNYSHSRERPYKCVQPDCGKAFVSRYKLMRHMATHSPQKSHQCAHCEKTFNRKDHLKNHLQTHDPNKMAFGCEECGKKYNTMLGYKRHLALHAASSGDLTCGVCALELGSTEVLLDHLKAHAEEKPPSGTKEKKHQCDHCERCFYTRKDVRRHLVVHTGCKDFLCQFCAQRFGRKDHLTRHTKKTHSQELMKESLQTGDLLSTFHTISPSFQLKAAALPPFPLGASAQNGLASSLPAEVHGLTLSPPEQAAQPMQPLPESLASLHPSVSPGSPPPPLPNHKYNTTSTSYSPLASLPSKQILKVFAISVCLRTCLCKSLSHLKSSTQVLIWLREMLVK

SEQ ID NO: 3663 - protein, 961 aa, Homo sapiens
MSGPTDETAGDLPVKDTGLNLFGMGGLQETSTTRTMKSRQAVSRVSREELEDRFLRLHDENILLKQHARKQEDKIKRMATKLIRLVNDKKRYERVGGGPKRLGRDVEMEEMIEQLQEKVHELEKQNETLKNRLISAKQQLQTQGYRQTPYNNVQSRINTGRRKANENAGLQECPRKGIKFQDADVAETPHPMFTKYGNSLLEEARGEIRNLENVIQSQRGQIEELEHLAEILKTQLRRKENEIELSLLQLREQQATDQRSNIRDNVEMIKLHKQLVEKSNALSAMEGKFIQLQEKQRTLRISHDALMANGDELNMQLKEQRLKCCSLEKQSHSMKFSERRIEELQDRINDLEKERELLKENYDKLYDSAFSAAHEEQWKLKEQQLKVQIAQLETALKSDLTDKTEILDRLKTERDQNEKLVQENRELQLQYLEQKQQLDELKKRIKLYNQENDINADELSEALLLIKAQKEQKNGDLSFLVKVDSEINKDLERSMRELQATHAETVQELEKTRNMLIMQHKINKDYQMEVEAVTRKMENLQQDYELKVEQYVHLLDIRAARIHKLEAQLKDIAYGTKQYKFKPEIMPDDSVDEFDETIHLERGENLFEIHINKVTFSSEVLQASGDKEPVTFCTYAFYDFELQTTPVVRGLHPEYNFTSQYLVHVNDLFLQYIQKNTITLEVHQAYSTEYETIAACQLKFHEILEKSGRIFCTASLIGTKGDIPNFGTVEYWFRLRVPMDQAIRLYRERAKALGYITSNFKGPEHMQSLSQQAPKTAQLSSTDSTDGNLNELHITIRCCNHLQSRASHLQPHPYVVYKFFDFADHDTAIIPSSNDPQFDDHMYFPVPMNMDLDRYLKSESLSFYVFDDSDTQENIYIGKVNVPLISLAHDRCISGIFELTDHQKHPAGTIHVILKWKFAYLPPSGSITTEDLGNFIRSEEPEVVQRLPPASSVSTLVLAPT

SEQ ID NO: 3664 - protein, 147 aa, Homo sapiens [sequence omitted]

SEQ ID NO: 3665 - protein, 1126 aa, Homo sapiens [sequence omitted]

SEQ ID NO: 3666 - protein, 388 aa, Homo sapiens
MSILKIHARELFDSRGNSTVEVDLFTSEGLFRAAVPSGASTGIYEVLELQDNDKTRYMGKGVSKPVEPINKTIAPVLVSKKLNVTEQEKIDKLMIEMDGTENKSKFGANAILGVSLAACKASAVEKGVPLYHHIADLSGNSKVILPVPVFNVINGSSHAVTKLAMQEFMVLPVGAANFREAMPIGAEVYHSLKNVIKEKYGKDATGVGDGGAFAPNILENKEGLELLKTAIGKAGYTDKVIVSMDVEASEFFRSGKYDLEFKFLDDPTRYISPDCLADLYKSFIKNYPVVSTEDPFDQDDWGAWQKFTASAGIQVVEDDLRVTNPKRTASAVNEKKCNCLLLKVNQIRSVTESLQACKLAQANGWCVMVPHHSGETENTFITDLVVGL

SEQ ID NO: 3667 - protein, 448 aa, Homo sapiens
MAAENSKQFWKRSAKLPGSIQPVYGAQHPPLDPRLTKNFIKERSKVNTVPLKNKKASSFHEFARNTSDAWDIGDDEEEDFSSPSFQTLNSKVALATAAQVLENHSKLRVKPERSQSTTSDVPANYKVIKSSSDAQLSRNSSDTCLRNPLHKQQSLPLRPIIPLVARISDQNASGAPPMTVREKTRLEKFRQLLSSQNTDLDELRKCSWPGVPREVRPITWRLLSGYLPANTERRKLTLQRKREEYFGFIEQYYDSRNEEHHQDTYRQIHIDIPRTNPLIPLFQQPLVQEIFERILFIWAIRHPASGYVQGINDLVTPFSVVFLSEYVEEDVENFDVTNLSQDMLRSIEADGFWCMSKLLDGIQDNYTFAQPGIQKKVKALEELVSRIDEQVHNHFRRYEVEYLQFAFRWMNNLLMRELPLRCTIRLWDTYQSEPEGFSHFHLYVCAAF

SEQ ID NO: 3668 - protein, 593 aa, Homo sapiens
MESGPRAELGAGAPPAVVARTPPEPRPSPEGDPSPPPPPMSALVPDTPPDTPPAMKNATSSKQLPLEPESPSGQVGPRPAPPQEESPSSEAKSRGPTPPAMGPRDARPPRRSSQPSPTAVPASDSPPTKQEVKKAGERHKLAKERREERAKYLAAKKAVWLEKEEKAKALREKQLQERRRRLEEQRLKAEQRRAALEERQRQKLEKNKERYEAAIQRSVKKTWAEIRQQRWSWAGALHHSSPGHKTSGSRCSVSAVNLPKHVDSIINKRLSKSSATLWNSPSRNRSLQLSAWESSIVDRLMTPTLSFLARSRSAVTLPRNGRDQAVPVCPRSASASPLTPCSVTRSVHRCAPAGERGERRKPNAGGSPAPVRRRPEASPVQKKEKKDKERENEKEKSALARERSLKKRQSLPASPRARLSASTASELSPKSKARPSSPSTSWHRPASPCPSPGPGHTLPPKPPSPRGTTASPKGRVRRKEEAKESPSAAGPEDKSQSKRRASNEKESAAPASPAPSPAPSPTPAPPQKEQPPAETPTDAAVLTSPPAPAPPVTPSKPMAGTTDREEATRLLAEKRRQAREQREREEQERRLQA

SEQ ID NO: 3669 - protein, 592 aa, Homo sapiens
MGPLQFRDVAIEFSLEEWHCLDTAQRNLYRNVMLENYSNLVFLGIVVSKPDLIAHLEQGKKPLTMKRHEMVANPSVICSHFAQDLWPEQNIKYSFQKVILRRYEKRGHGNLQLIKRCESVDECKVHTGGYNGLNQCSTTTQSKVFQCDKYGKVFHKFSNSNRHNIRHTEKKPFKCIECGKAFNQFSTLITHKKIHTGEKPYICEECGKAFKYSSALNTHKRIHTGEKPYKCDKCDKAFIASSTLSKHEIIHTGKKPYKCEECGKAFNQSSTLTKHKKIHTGEKPYKCEECGKAFNQSSTLTKHKKIHTGEKPYVCEECGKAFKYSRILTTHKRIHTEEKPYKCNKCGKAFIASSTLSRHEFIHMGKKHYKCEECGKAFIWSSVLTRHKRVHTGEKPYKCEECGKAFVASSTLSKHEIIHTGKKPYKCEECGKAFNQSSSLTKHKKIHTGEKPYKCEECGKAFNQSSSLTKHKKIHTGEKPYKCEECGKAFNQSSTLIKHKKIHTREKPYKCEECGKAFHLSTHLTTHKILHTGEKPYRCRECGKAFNHSATLSSHKKIHSGEKPYECDECGKAFISPSSLSRHEIIHTGEKP

SEQ ID NO: 3670 - protein, 471 aa, Homo sapiens
MSEGVDLIDIYADEEFNQDPEFNNTDQIDLYDDVLTATSQPSDDRSSSTEPPPPVRQEPSPKPNNKTPAILYTYSGLRNRRAAVYVGSFSWWTTDQQLIQVIRSIGVYDVVELKFAENRANGQSKGYAEVVVASENSVHKLLELLPGKVLNGEKVDVRPATRQNLSQFEAQARKRECVRVPRGGIPPRAHSRDSSDSADGRATPSENLVPSSARVDKPPSVLPYFNRPPSALPLMGLPPPPIPPPPPLSSSFGVPPPPPGIHYQHLMPPPPRLPPHLAVPPPGAIPPALHLNPAFFPPPNATVGPPPDTYMKASAPYNHHGSRDSGPPPSTVSEAEFEDIMKRNRAISSSAISKAVSGASAGDYSDAIETLLTAIAVIKQSRVANDERCRVLISSLKDCLHGIEAKSYSVGASGSSSRKRHRSRERSPSRSRESSRRHRDLLHNEDRHDDYFQERNREHERHRDRERDRHH

SEQ ID NO: 3671 - protein, 282 aa, Homo sapiens
MALEAAGGPPEETLSLWKREQARLKAHVVDRDTEAWQRDPAFSGLQRVGGVDVSFVKGDSVRACASLVVLSFPELEVVYEESRMVSLTAPYVSGFLAFREVPFLLELVQQLREKEPGLMPQVLLVDGNGVLHHRGFGVACHLGVLTDLPCVGVAKKLLQVDGLENNALHKEKIRLLQTRGDSFPLLGDSGTVLGMALRSHDRSTRPLYISVGHRMSLEAAVRLTCCCCRFRIPEPVRQADICSREHIRKSLGLPGPPTPRSPKAQRPVACPKGDSGESSALC

SEQ ID NO: 3672 - protein, 1133 aa, Homo sapiens [sequence omitted]

SEQ ID NO: 3673 - protein, 812 aa, Homo sapiens
MEAFQELRKPSARLECDHCSFRGTDYENVQIHMGTIHPEFCDEMDAGGLGKMIFYQKSAKLFHCHKCFFTSKMYSNVYYHITSKHASPDKWNDKPKNQLNKETDPVKSPPLPEHQKIPCNSAEPKSIPALSMETQKLGSVLSPESPKPTPLTPLEPQKPGSVVSPELQTPLPSPEPSKPASVSSPEPPKSVPVCESQKLAPVPSPEPQKPAPVSPESVKATLSNPKPQKQSHFPETLGPPSASSPESPVLAASPEPWGPSPAASPESRKSARTTSPEPRKPSPSESPEPWKPFPAVSPEPRRPAPAVSPGSWKPGPPGSPRPWKSNPSASSGPWKPAKPAPSVSPGPWKPIPSVSPGPWKPTPSVSSASWKSSSVSPSSWKSPPASPESWKSGPPELRKTAPTLSPEHWKAVPPVSPELRKPGPPLSPEIRSPAGSPELRKPSGSPDLWKLSPDQRKTSPASLDFPESQKSSRGGSPDLWKSSFFIEPQKPVFPETRKPGPSGPSESPKAASDIWKPVLSIDTEPRKPALFPEPAKTAPPASPEARKRALFPEPRKHALFPELPKSALFSESQKAVELGDELQIDAIDDQKCDILVQEELLASPKKLLEDTLFPSSKKLKKDNQESSDAELSSSEYIKTDLDAMDIKGQESSSDQEQVDVESIDFSKENKMDMTSPEQSRNVLQFTEEKEAFISEEEIAKYMKRGKGKYYCKICCCRAMKKGAVLHHLVNKHNVHSPYKCTICGKAFLLESLLKNHVAAHGQSLLKCPRCNFESNFPRGFKKHLTHCQSRHNEEANKKLMEALEPPLEEQQI

SEQ ID NO: 3674 - protein, 1083 aa, Homo sapiens
MNSVLTKHGSPPRSWLSLCSGTDDQSPAEKKGLRCQNPACMDKGRAAKVCHHADCQQLHRRGPLNLCEACDSKFHSTMHYDGHVRFDLPPQGSVLARNVSTRSCPPRTSPAVDLEEEEEESSVDGKGDRKSTGLKLSKKKARRRHTDDPSKECFTLKFDLNVDIETEIVPAMKKKSLGEVLLPVFERKGIALGKVDIYLDQSNTPLSLTFEAYRFGGHYLRVKAPAKPGDEGKVEQGMKDSKSLSLPILRPAGTGPPALERVDAQSRRESLDILAPGRRRKNMSEFLGEASIPGQEPPTPSSCSLPSGSSGSTNTGDSWKNRAASRFSGFFSSGPSTSAFGREVDKMEQLEGKLHTYSLFGLPRLPRGLRFDHDSWEEEYDEDEDEDNACLRLEDSWRELIDGHEKLTRRQCHQQEAVWELLHTEASYIRKLRVIINLFLCCLLNLQESGLLCEVEAERLFSNIPEIAQLHRRLWASVMAPVLEKARRTRALLQPGDFLKGFKMFGSLFKPYIRYCMEEEGCMEYMRGLLRDNDLFRAYITWAEKHPQCQRLKLSDMLAKPHQRLTKYPLLLKSVLRKTEEPRAKEAVVATIGSVERFIHHVNACMRQRQERQRLAAVVSRIDAYEVVESSSDEVDKLLKEFLHLDLTAPIPGASPEETRQLLLEGSLRMKEGKDSKMDVYCFLFTDLLLVTKAVKKAERTRVIRPPLLVDKIVCRELRDPGSFLLIYLNEFHSAVGAYTFQASGQALCRGWVDTIYNAQNQLQQLRAQEPPGSQQPLQSLEEEEDEQEEEEEEEEEEEEGEDSGTSAASSPTIMRKSSGSPDSQHCASDGSTETLAMVVVEPGDTLSSPEFDSGPFSSQSDETSLSTTASSATPTSELLPLGPVDGRSCSMDSAYGTLSPTSLQDFVAPGPMAELVPRAPESPRVPSPPPSPRLRRRTPVQLLSCPPHLLKSKSEASLLQLLAGAGTHGTPSAPSRSLSGLCLAVPAPGIRTQGSPQEAGPSWDCRGAPSPGSGPGLVGCLAGEPAGSHRKRCGDLPSGASPRVQPEPPPGVSAQHRKLTLAQLYRIRTTLLLNSTLTASEV

SEQ ID NO: 3675 - protein, 145 aa, Homo sapiens [sequence omitted]

SEQ ID NO: 3676 - protein, 168 aa, Homo sapiens
MMEEIDRFQVPTAHSEMQPLDPAAASISDGDCDAREEKQRELARKGSLKNGSMGSPVNQQPKKNNVMARTRLVVPNKGYSSLDQSPDEKPLVALDTDSDDDFDMSRYSSSGYSSAEQINQDLNIQLLKDGYRLDEIPDDEDLDLIPPKSVNPTCMCCQATSSTACHIQ

SEQ ID NO: 3677 - protein, 138 aa, Homo sapiens
MIVRPPQPCGTVSPLNLSFFCKLPSLGFVNRLIQWLFTLQNKVLRDLHALAPGQATSSGVRSLIRLSLAHPSLSHGFFADPDTHHTCLLYLEVVFPISTWLTSSLHSSLCSDINLFREPFLHTLSCIAASPTSCLLSP

SEQ ID NO: 3678 - protein, 467 aa, Homo sapiens [sequence omitted]

SEQ ID NO: 3679 - protein, 1314 aa, Homo sapiens [sequence omitted]

SEQ ID NO: 3680 - protein, 229 aa, Homo sapiens
MQPLEVGLVPAPAGEPRLTRWLRRGSGILAHLVALGFTIFLTALSRPGTSLFSWHPVFMALAFCLCMAEAILLFSPEHSLFFFCSRKARIRLHWAGQTLAILCAALGLGFIISSRTRSELPHLVSWHSWVGALTLLATAVQALCGLCLLCPRAARVSRVARLKLYHLTCGLVVYLMATVTVLLGMYSVWFQAQIKGAAWYLCLALPVYPALVIMHQISRSYLPRKKMEM

SEQ ID NO: 3681 - protein, 153 aa, Homo sapiens
MVLEPYVQGFSLTVLSSLSRSWSPMCEGSLSWSWSPKHEGSLSRSWSPTCKDSLSRSWVLSHGSGALHTRILSHGPGFSLMVLEPYVQGFSLTVLGSLSRFWSPTYKDSLSRSWALSHGPGALRARILYHSPGFSLTVLEPYTQGFSLAVLKP

SEQ ID NO: 3682 - protein, 272 aa, Homo sapiens
MNSDSSSVSSRASSPDMDEMYLRDHHHRHHHHQESRLNSVSSTQGDMMQKMPGESLSRAGAKAAGESSKYKIKKQLSEQDLQQLRLKINGRERKRMHDLNLAMDGLREVMPYAHGPSVRKLSKIATLLLARNYILMLTSSLEEMKRLVGEIYGGHHSAFHCGTVGHSAGHPAHAANSVHPVHPILGGALSSGNASSPLSAASLPAIGTIRPPHSLLKAPSTPPALQLGSGFQHWAGLPCPCTICQMPPPPHLSALSTANMARLSAESKDLLK

SEQ ID NO: 3683 - protein, 582 aa, Homo sapiens
MDPKAGGGGEEDDCVDSGAETGGSDYSHLSSTSNGFSTWRMPCCLFLYCTHGDKEKGRWSLQVEHTWPSGELSVEEAQDPFLVSIHIIADPGESQPLQEAIDNVLAWIHPDLPLFRVSERRASRRRRKPPKGAQPALAVVLFLQEEYGEEQILQLHRTLQQPPWRHHHTEQVHGRFLPYLPCSQDFFTLAPGTPLWAIRPVHYGKEIVRFTVYCRYDNYADSLRFYQLILRRNPSQKKADFCIFPIFSNLDVDIQFSLKRLPCDQCPVPTDSSVLEFRVRDIGELVPLLPNPCSPISEGRWQTEDHDGNKILLQAQRVHKKFPKPGRVHHASEKKRHSTPLPSTAVPSHTPGSSQQSPLNSPHPGPIRTGLPPGHQQEFAGRANSTPNPPWSFQRSKSLFCLPTGGPSLASSAEPQWFSNTGAPGHRASEWRHGHLLSIDDLEGAQETDVDTGLRLSSSDLSVVSAYSAPSRFCSTVETPLPSERCSSHWAAHKDSREGPLPTVSRVTTEASWASLPFFTKRSSSSSATARAAPPAPSTSTLTDSSPQLPCDTPKVKQTDGDMPPPPGSAGPGDNDMEEFYI

SEQ ID NO: 3684 - protein, 108 aa, Homo sapiens
MLSFMMAFRGASAVRVTPTLSLKGKTVERTAERLLSGKTVLVCFLGSLVSDCPVFPSWLWSHWPLFGDILPQEPSLALPSPSPSQFSQTHWKRTLTLPNYLLGSHPNL

SEQ ID NO: 3685 - protein, 118 aa, Homo sapiens
METEGRGECSLSKISRLVIGEKILHRTIPSGETVFVLQPGKGRPGSLLLFASLKTIKTGKDTRRARTFAETPPTQVEEALAPLLSGWKGNTAAMTHECQRDQVPIRETEMEKKSRAKV

SEQ ID NO: 3686 - protein, 107 aa, Homo sapiens
MIFFQFLLVRKRIYSPFILRNIFPEYRVLIWGIRIFSSTDSQLSQHCLLKTSLNFLDIFQKINFHISMGLFLDSLFCSIDISIPMAFIPHCIDYYRFIASLDIIIGL

SEQ ID NO: 3687 - protein, 204 aa, Homo sapiens
MGNCPCDGEESLTLIFFLFSSSLLLLFSPLSLLFFLFSSVFLFLFSSSPLPLSLSSFFSSSFSFSFSSLLSLFLPSFFPSFLPSFLPSFPPSLPPSSLFLFLSFFLVWQSLALLPRLQCSGVISAHCNLHLPGSSNSLASASPVTGTTGAYHHARLIFVFLVEAGFCHVGQADLKLLTSGDPPASAFQSAEITGMSRCTRPDFL

SEQ ID NO: 3688 - protein, 106 aa, Homo sapiens
MRLVQGEAVCCVPGPATSWRACAGTWSCPTWAAACVCDCTVATLAHTPLAHPSAPPVSISLGSGIQVGSKCEWAEAAQWAQSKTQAKVPLDWPGKRHPKDPIMLIC

SEQ ID NO: 3689 - protein, 287 aa, Homo sapiens [sequence omitted]

SEQ ID NO: 3690 - protein, 122 aa, Homo sapiens
MVLLCLFLASLAATPRAGVTGAWPTSGLSILAQLQPSCELRWTQLSRSSWRDLVMTTSLWSLAYFQHFSQETTTQEQLDEMEEIPRESQCGRQDFHALSCPTASPRDRVLLCCPGWRAMVPS

SEQ ID NO: 3691 - protein, 123 aa, Homo sapiens
MVDGRTRTIINDIFFTEPTPEMSSLPVRSHSSLSLNLVSLMVICRGIIKLVIHFRMYCPPRLKAKHIEPTLRPVPLKELRISHWPNECIRHSASVPMATGANGLETKDETKRNAEKCACSVFL

SEQ ID NO: 3692 - protein, 599 aa, Homo sapiens
MFTLSLLSRGHGKLGQDKQKLEVYFEPEDYLNWRSPEDYVPASKPQDKNNASQHSWSLFLPKTFSTRKGALILYSEGFAISAWTPKERRKGPYCPRGPWRKLDLELHTLQDLKEAILAYGRQQLNLPMGDAGKRLEREKKRKTTVFLPSHSASSEKKHLHYLCDTALNRQAHYDPQLLQGEQDRAWQPYLHFRSQLESQAQRQIQPGHSAKRYLRGLLRTWPPDAMYRLWCAGYIKDSVLLQDSQLNVPKKLRPQQDLSGVPPKYHLLPVFPSFWIQQGKSFEQRQQGLDEGEAGAAGHVDQGPLAKNHGSQGTRLPPRRKQPWQEDETQAEDTSIENHLCLYASKESYNEKTQQTSRKAFGHGRIDHSWLPSDKSHITFCGGAFPNRKADLSDKQRNVKLHKARSSHLLQVLPAERSLFPPVASATGSRIITPGEVKKKKAPKALKLPPISEEPPRVLEPLKSQFKANEPPTELFILPVEIHYHTKQPPKEKAHRRGAPHPESEPESSEESTPVWRPPLKHASLETPWELTVHLPVDASRDTLSPQGSSSLPPASLGNLTLKGSKARHTRVHSQGKGVWKGDDDAPPHDVAPPLDLLP

SEQ ID NO: 3693 - protein, 231 aa, Homo sapiens
MVSPLRRYTRHIDSSPYSPAYLSPPPESSWRRTMAWGNFPAEKGQLFRLPSALNRTSSDSALHTSVMNPSPQDTYPGPTPPSILPSRRGGILDGEMDPKVFLFQVPAIEENLLDDKHLLKPWDAKKLSSSSSRPRSCEVPGINIFPSPDQPANVPVLPPAMNTGGSLPDLTNLHFPPPLPTPLDPEETAYPSLSGGNSTSNLTHTMTHLGISRGMGLGPGYDAPGRPPGYQ

SEQ ID NO: 3694 - protein, 102 aa, Homo sapiens
MSGPGGGSGEASPRGALPHHVPCSYRPPRLGCPAPSIRARLSVDASPAEAPPGPQDRCVSPPPGGCPLYHQLTQQVSLISLWPGSLLGSECLHSPKLYVLRS

SEQ ID NO: 3695 - protein, 137 aa, Homo sapiens [sequence omitted]

SEQ ID NO: 3696 - protein, 278 aa, Homo sapiens [sequence omitted]

SEQ ID NO: 3697 - protein, 219 aa, Homo sapiens
MEPDSLLDQDDSYESPQERPGSRRSLPGSLSEKSPSMEPSAATPFRVTGFLSRRLKGSIKRTKSQPKLDRNHSFRHILPGFRSAAAAAADNERSHLMPRLKESRSHESLLSPSSAVEALDLSMEEEVVIKPVHSSILGQDYCFEVTTSSGSKCFSCRSAAERDKWMENLRRAVHPNKDNSRRVEHILKLWVIEAKDLPAALAGWVSSQAESLIYLVQKL

SEQ ID NO: 3698 - protein, 120 aa, Homo sapiens
MAGNHCELLPLARGRLGAGLGWLLVPPLKRGAQRPGPAPQQQVQVGPALQRRHLLPHHWADAAVSGPEILPVPLEPGRPRPGLGQDGVLFLLPKLEYNGTILAHHNLCHLGSSESPPSVS

SEQ ID NO: 3699 - protein, 110 aa, Homo sapiens
MWGQVSYKPLGSKSILRWHTISHNCIKKGFSLTSIKTKYLGEEETQVRGSRSHSTKDAISDTHPSLESYGTYFNIPTNTGQQRRQWLIFIIPQALTTGPTGSCKKKKMNE

SEQ ID NO: 3700 - protein, 836 aa, Homo sapiens [sequence omitted]

SEQ ID NO: 3701 - protein, 101 aa, Homo sapiens
MIQRQRWQLWSKWRARKGSRTGVEAEAMPSFMSDEAVSSDLKMMKKSSLQGCLLNITGKTGKLGGMFWSDLSFSSGARVQSSHQINTFSKLINFGEATQSS

SEQ ID NO: 3702 - protein, 138 aa, Homo sapiens [sequence omitted]

SEQ ID NO: 3703 - protein, 177 aa, Homo sapiens
MVILNLRARFRLVFRQNLQRPPPHPRPTESESSRDGARESAFLTRSLGNASDALKLGTTVPGPGQQSCLVNAGVSSCGDGEVNATPTAGQNLGLHRHSCLHLGPQNSIPEPCELIDTFRVWGTASFPSYPRRPLPSCPALHATPGWPLTPISRASEDPSTIHSFIHSFIHSFIHSST

SEQ ID NO: 3704 - protein, 602 aa, Homo sapiens
MVLAGLIRKLGHQLAEIRERALKSILCKIEHNLICYADLIQERQLFLHLLEWFNFPSVPMKEEVLNLLSRLVKYPPAVQHLVDVGAVEFLSKLRSNVEPNLQAEIDGILDGLFLLPSEVPALSSAAYQTNQTELSKNPEILTGYFPQDKSNFQQMEVPPRPVVNQTVKCLKFSTFPWLPLTTTDRHVLSSNESSLRSSNHTLIWNTCELLKDVIMQDFPAEIFLQRPKIVQSLLSLLKLAFGGDGKHRLALQSVSCLQQLCMYLRNRLNFHRDPGFFSNKHDTVSQNSSLSYCHEARGTHHSQNPSPGSSSPRPSVVGRTGQRPRGDGQDWDAASSSGSSSHAHVNSRISVHSPLDMGHIDLPELETEDTLELQFQQLSLPQFCVSILESAVPLLRTGSRQVIIRVLELLTEDMTLIGEAISTDIWDDSSLFGIDMKEKLLLVLGALGETMCYHKSSISLEQPEVMLVHHRMAFISISLFAVRLLQTLLPVEKASEFLSEPMSTALFLLSLDMPISLEYPNIHEAVVAYLEQLNSENYSIYKRTAEAVYSIECTCNFLSDIGKEGEKNLLELVELADQALRSFSYHQHFPLIKEIISICSKM

SEQ ID NO: 3705 - protein, 357 aa, Homo sapiens [sequence omitted]

SEQ ID NO: 3706 - protein, 275 aa, Homo sapiens
METKTSISIPKPGQDGEIVITGQHRNGVISARTRIDVLLDTFRRKQPFTHFLAFFLNEVEVQEGFLRFQEEVLAKCSMDHGVDSSIFQNPKKLHLTIGMLVLLSEEEIQQTCEMLQQCKEEFINDISGGKPLEVEMAGIEYMNDDPGMVDVLYAKVHMKDGSNRLQELVDRVLERFQASGLIVKEWNSVKLHATVMNTLFRKDPNAEGRYNLYTAEGKYIFKERESFDGRNILKSFALLPRLEYNDAISAHCNLCLPGSSDSPASASQVAGITVV

SEQ ID NO: 3707 - protein, 351 aa, Homo sapiens
MIVQRVVLNSRPGKNGNPVAENFRMEEVYLPDNINEGQVQVRTLYLSVDPYMRCRMNEDTGTDYITPWQLSQVVDGGGIGIIEESKHTNLTKGDFVTSFYWPWQTKVILDGNSLEKVDPQLVDGHLSYFLGAIGMPGLTSLIGIQEKGHITAGSNKTMVVSGAAGACGSVAGQIGHFLGCSRVVGICGTHEKCILLTSELGFDAAINYKKDNVAEQLRESCPAGVDVYFDNVGGNISDTVISQMNENSHIILCGQISQYNKDVPYPPPLSPAIEAIQKERNITRERFLVLNYKDKFEPGILQLSQWFKEGKLKIKETVINGLENMGAAFQSMMTGGNIGKQIVCISEEISL

SEQ ID NO: 3708 - protein, 233 aa, Homo sapiens [sequence omitted]

SEQ ID NO: 3709 - protein, 108 aa, Homo sapiens
MAPPSPKIIDPIISPEHPELWKLMMAQSPIRIWKAECKTETHSKKLRFVVAMTSNQMVPLQSCVKPPFMLAVGKINILPDSQTISCLNCRLFTCIISAFNKDNSILLV

SEQ ID NO: 3710 - protein, 607 aa, Homo sapiens [sequence omitted]

SEQ ID NO: 3711 - protein, 175 aa, Homo sapiens
MRIPGSTLLPWPSALPPLTPLPCLQDLQGSVERICGFLGRPLGKEALGSVVAHSTFSAMKANTMSNYTLLPPSLLDHRRGAFLRKGVCGDWKNHFTVAQSEAFDRAYRKQMRGMPTFPWDEDPEEDGSPDPEPSPEPEPKPSLEPNTSLEREPRPNSSPSPSPGQASETPHPRPS

SEQ ID NO: 3712 - protein, 520 aa, Homo sapiens
MSLSPCRAQRGFSARSACSARSRGRSRGGFSSRGGFSSRSLNSFGGCLEGSRGSTWGSGGRLGVRFGEWSGGPGLSLCPPGGIQEVTINQNPLTPLKIEIDPQFQVVRTQETQEIRTLNNQFASFIDKVRFLEQQNKVLETKWHLLQQQGLSGSQQGLEPVFEACLDQLRKQLEQLQGERGALDAELKACRDQEEEYKSKYEEEAHRRATLENDFVVLKKDVDGVFLSKMELEGKLEALREYLYFLKHLNEEELGQLQAQASDTSVVLSMDNNRYLDFSSIITEVRARYEEIARSSKAEAEALYQTKYQELQVSAQLHGDRMQETKVQISQLHQEIQRLQSQTENLKKQNASLQAAITDAEQRGELALKDAQAKVDELEAALRMAKQNLARLLCEYQELTSTKLSLDVEIATYRRLLEGEECRMSGECTSQVTISSVGGSAVMSGGVGGGLGSTCGLGSGKGSPGSCCTSIVTGGSNIILGSGKDPVLDSCSVSGSSAGSSCHTILKKTVESSLKTSITY

SEQ ID NO: 3713 - protein, 178 aa, Homo sapiens [sequence omitted]

SEQ ID NO: 3714 - protein, 526 aa, Homo sapiens [sequence omitted]

SEQ ID NO: 3715 - protein, 483 aa, Homo sapiens
MAAAARPRGRALGPVLPPTPLLLLVLRVLPACGATARDPGAAAGLSLHPTYFNLAEAARIWATATCGERGPGEGRPQPELYCKLVGGPTAPGSGHTIQGQFCDYCNSEDPRKAHPVTNAIDGSERWWQSPPLSSGTQYNRVNLTLDLGQLFHVAYILIKFANSPRPDLWVLERSVDFGSTYSPWQYFAHSKVDCLKEFGREANMAVTRDDDVLCVTECSRIVPLENGEVVVSLINGRPGAKNFTFSHTLREFTKATNIRLRFLRTNTLLGHLISKAQRDPTVTRRYYYSIKDISIGGQCVCNGHAEVCNINNPEKLFRCECQHHTCGETCDRCCTGYNQRRWRPAAWEQSHECEACNCHGHASNCYYGPDVERQQASLNTQGIYAGGGVCINCQHNTAGVNCEQCAKGYYRPYGVPVDAPDGCIPCSCDPEHADGCEQGSGRCHCKPNFHGDNCEKCASAESMSWERCASGLKTTTISQICII

SEQ ID NO: 3716 - protein, 266 aa, Homo sapiens [sequence omitted]

SEQ ID NO: 3717 - protein, 157 aa, Homo sapiens
MVDKNVIEIGAGTGLVSIVASLLGAHVTATDLPELLGNLQYNISRNTKMKSKHLPQVKELSWGVALDTNFPRSSNNFDYILAADVVYAHPFLEELLITFDHLCKETTIILWAMKFRLEKENKFVDRFKELFDLEEISSFPSLNIKLYKAVKKNRRSV

SEQ ID NO: 3718 - protein, 210 aa, Homo sapiens
MVADIKGNEQIEKYSWREACDTGSSRMDRKHGKYILNVEHSENQPPITHPNDQEAHSSICWCLPSNDITSDVSPNLTGVCVNPGILAHSRCLQSESCNTQVKEYCRNDWSMWKVFLACLLACVIMTAIGVLIICLVNNKGSANSSIVIQLSTNDGECVTVKPGTPSPACPPTMTTTSTVPASTATESTTSTATAATTSTEPITVAPTDHL

SEQ ID NO: 3719 - protein, 126 aa, Homo sapiens
MAALCRLCRHMIADCHCWGEEGGPLSTRQIPTPNIETEKSQAGKHKLSPVWRLRGLAPRYARFTLALRPSMMGFGSLQALSAAARSAMVTWWSRDTSGAAVGGTRGERGRRLRPGTGCCHPSLPFL

SEQ ID NO: 3720 - protein, 272 aa, Homo sapiens
MLQLRDSVDSAGTSPTAVLAAGEEVGAGGGPGGGRPGAGTPLRQTLWPLSIHDPTRRARVKEYFVFRPGSIEQAVEEIRVVVRPVEDGEIQGVWLLTEVDHWNNEKERLVLVTEQSLLICKYDFISLQCQQVVRIALDAVDTISYGEFQFPPKSLNKREGFGIRIQWDKQSRPSFINRWNPWSTNVPYATFTEHPMAGADEKTASLCQLESFKALLIQAVKKAQKESPLPGQANGVLILERPLLIETYVGLMSFINNEAKLGYSMTRGKIGF

SEQ ID NO: 3721 - protein, 539 aa, Homo sapiens
MDGEAVRFCTDNQCVSPHPQEVDSVAMAPAAPKIPRLVQATPAFMAVTLVFSLVTLFVVVQQQTRPVPKPVQAVILGDNITGHLPFEPNNHHHFGREAEMRELIQTFKGHMENSSAWVVEIQMLKCRVDNVNSQLQVLGDHLGNTNADIQMVKGVLKDATTLSLQTQMLRSSLEGTNAEIQRLKEDLEKADALTFQTLNFLKSSLENTSIELHVLSRGLENANSEIQMLNASLETANTQAQLANSSLKNANAEIYVLRGHLDSVNDLRTQNQVLRNSLEGANAEIQGLKENLQNTNALNSQTQAFIKSSFDNTSAEIQFLRGHLERAGDEIHVLKRDLKMVTAQTQKANGRLDQTDTQIQVFKSEMENVNTLNAQIQVLNGHMKNASREIQTLKQGMKNASALTSQTQMLDSNLQKASAEIQRLRGDLENTKALTMEIQQEQSRLKTLHVVITSQEQLQRTQSQLLQMVLQGWKFNGGSLYYFSSVKKSWHEAEQFCVSQGAHLASVASKEEQAFLVEFTSKVYYWIGLTDRGTEGSWR

SEQ ID NO: 3722 - protein, 756 aa, Homo sapiens
MESLYEKVSLMTSSEEIHKGDVKTCTWLFETQPLDTIKDDSETAVKLQTVKQEEIQGGDVRTACFLFETENLDSIQGEEVKEIKPVEMDIQAGDVSSMRYKFENQSLDSISSSSEEVLKKIKTLKTEDIQKGNVLNCRWLFENQPIDKIKESQEGDECVKTVTDIQGGDVRKGCFIFETFSLDEIKEESDYISTKKTITEEVIQGDVKSYRMLFETQPLYAIQDREGSYHEVTTVKKEEVIHGDVRGTRWLFETKPLDSINKSETVYVIKSVTQEDIQKGDVSSVRYRFETQPLDQISEESHNIMPSIDHIQGGNVKTSRQFFESENFDKNNYIRTVSVNEIQKGNVKTSTWLFETHTMDELRGEGLEYENIKTVTQEDVQKGDVKQAVWLFENRTFDSIMEAHKGITKMTKEEIPPSDVKTTTWLFETTPLHEFNETRVEKIEIIGKSIKETLEDLYSQKVIQAPGIIIEADEIGDVRMAKYKLMNQASPEIQKEEIIRADLRNIMVNLLSKRDCTEREILISEEEKGNVNLTKTQLLNRSTEFHAEKEEIVKGDVQQAIKNLFSEERSVKKGILIQEDEKGDINMTIYCLLHENDGDTIEREEVIGGDVKRTIHNLLSSTSNNKISERAKIDASERGNVQFFTTCIEAGALDYLKQLHTESNETLTAKKQEGEKEIIGGDVEGTKLLLKKRQSLVERTVSETDIIPGDVHNTVKVFMTEPQSTFGKIPKEEIIKGDLTSTLNSLSQAVNQKTVT

SEQ ID NO: 3723 - protein, 366 aa, Homo sapiens [sequence omitted]

SEQ ID NO: 3724 - protein, 298 aa, Homo sapiens
MDTGVWGWGAAACRWGPAERAAGSLNAASLREEQLHLSLLVSSGWRTISFHVVPVVRRKLGAPALEGVQQMPGFPEGSLRRILSQGVDLVPASAQLWRTSTDYLLTRLLGELGSLQGHRLDSLSILDRVNHESWRDSGQTDGLTFGHLKMVLLWASVLFPAPEDWAELQGAVYRLLVVLLCCLATRKLPHFLHPQRNLLQGSGLDLGAIYQRVEGFASQPEAALRIHATHLGRSPPPRIGSGLKALLQLPASDPTYWATAYFDVLLDKFQVFNIQDKDRISAMQSIFQKTRTLGGEES

SEQ ID NO: 3725 - protein, 545 aa, Homo sapiens
MPPFLLLTCLFITGTSVSPVALDPCSAYISLNEPWRNTDHQLDESQGPPLCDNHVNGEWYHFTGMAGDAMPTFCIPENHCGTHAPVWLNGSHPLEGDGIVQRQACASFNGNCCLWNTTVEVKACPGGYYVYRLTKPSVCFHVYCGHFYDICDEDCHGSCSDTSECTCAPGTVLGPDRQTCFDENECEQNNGGCSEICVNLKNSYRCECGVGRVLRSDGKTCEDVEGCHNNNGGCSHSCLGSEKGYQCECPRGLVLSEDNHTCQVPVLCKSNAIEVNIPRELVGGLELFLTNTSCRGVSNGTHVNILFSLKTCGTVVDVVNDKIVASNLVTGLPKQTPGSSGDFIIRTSKLLIPVTCEFPRLYTISEGYVPNLRNSPLEIMSRNHGIFPFTLEIFKDNEFEEPYREALPTLKLRDSLYFGIEPVVHVSGLESLVESCFATPTSKIDEVLKYYLIRDGCVSDDSVKQYTSRDHLAKHFQVPVFKFVGKDHKEVFLHCRVLVCGVLDERSRCAQGCHRRMRRGAGGEDSAGLQGQTLTGGPIRIDWED

SEQ ID NO: 3726 - protein, 439 aa, Homo sapiens
MDRKGQCYHYDQTNRQGQGSHYSQPNRQGQSSHYGQPDTQDQSSHYGQTDRQDQSSHYGQTERQGQSSHYSQMDRQGQGSHYGQTDRQGQSSHYGQPDRQGQNSHYGQTDRQGQSSHYGQTDRQGQSSHYSQPDKQGQSSHYGKIDRQDQSYHYGQPDGQGQSSHYGQTDRQGQSFHYGQPDRQGQSSHYSQMDRQGQSSHYGQTDRQGQSSHYGQTDRQGQSYHYGQTDRQGQSSHYIQSQTGEIQGQNKYFQGTEGTRKASYVEQSGRSGRLSQQTPGQEGYQNQGQGFQSRDSQQNGHQVWEPEEDSQHHQHKLLAQIQQERPLCHKGRDWQSCSSEQGHRQAQTRQSHGEGLSHWAEEEQGHQTWDRHSHESQEGPCGTQDRRTHKDEQNHQRRDRQTHEHEQSHQRRDRQTHEDKQNRQRRDRQTHEDEQNHQR

SEQ ID NO: 3727 - protein, 315 aa, Homo sapiens [sequence omitted]

SEQ ID NO: 3728 - protein, 112 aa, Homo sapiens
MVERAVNCYVAQECLSHQVVLPSARIAHHGVHCAFVAPWQMGASPEGTGPQARQLSEVADSWRPPAAALATARAASPAWKEDVGGASPPAIKLPRCLTQAAGQLKAEIGGSW

SEQ ID NO: 3729 - protein, 445 aa, Homo sapiens
MTMFENVTRALARQLNPRGDLTPLDSLIDFKRFHPFCLVLRKRKSTLFWGARYVRTDYTLLDVLEPGSSPSDPTDTGNFGFKNMLDTRVEGDVDVPKTVKVKGTAGLSQNSTLEVQTLSVAPKALETLQERKLAADHPFLKEMQDQGENLYVVMEVVETVQEVTLERAGKAEACFSLPFFAPLGLQGSINHKEAVTIPKGCVLAFRVRQLMVKGKDEWDIPHICNDNMQTFPPGEKSGEEKVILIQASDVGDVHEGFRTLKEEVQRETQQVEKLSRVGQSSLLSSLSKLLGKKKELQDLELALEGALDKGHEVTLEALPKDVLLSKEAVGAILYFVGALTELSEAQQKLLVKSMEKKILPVQLKLVESTMEQNFLLDKEGVFPLQPELLSSLGDEELTLTEALVGLSGLEVQRSGPQYMWDPDTLPRLCALYAGLSHLQQLTKAS

SEQ ID NO: 3730 - protein, 155 aa, Homo sapiens
MVSDLVIILNYDRAVEAFAKGGNLTLGGNLTVAVGPLGRNLEGNVALRSSAAVFTYCKSRGLFAGVSLEGSCLIERKETNRKFYCQDIRAYDILFGDTPRPAQAEDLYEILDSFTEKYENEGQRINARKAAREQRKSSVPFGFMFHSVFSENLFL

SEQ ID NO: 3731 - protein, 329 aa, Homo sapiens
MSVLEENRPFAQQLSNVYFTILSLFCFKLFVKISLAILSHFYIVKGNRKEAARIAAEFYGVTQGQGSWADRSPLHEAASQGRLLALRTLLSQGYNVNAVTLDHVTPLHEACLGDHVACARTLLEAGANVNAITIDGVTPLFNACSQGSPSCAELLLEYGAKAQLESCLPSPTHEAASKGHHECLDILISWGIDVDQEIPHLGTPLYVACMSQQFHCIWKLLYAGADVQKGKYWDTPLHAAAQQSSTEIVNLLLEFGADINAKNTELLRPIDVATSSSMVERILLQHEATPSSLYQLCRLCIRSYIGKPRLHLIPQLQLPTLLKNFLQYR

SEQ ID NO: 3732 - protein, 366 aa, Homo sapiens
MSSSVKTPIFNRNDFDDSSFLPQEQKVHLREKPYECNEHSKVFRVSSSLTKHQVIHTVEKPYKCNSCGKVFSRNSHLAEHCRIHTGEKPYKCNVCGKVFSYNSNFARHQRIHTREKPYECNECGKVFSNNSYLARHQRIHAEEKPYKCNECGKGFSHKSSLANHWRIYTGEKPYKCDECGKAFYRIALLVRHQKIHTGEKPYKCNECGKVFIQNSHLAQHWRIHTGEKPYKCNECGKVFNQLSNLARHRRIHTGEKPYKCNECGKAFSEYSGLSAHLVIHTGEKPYKCSECGKAFRHKLSLTNHQRIHTGERPYKCNECGKVFNRIAHLARHRKIHTGEKPYKCNECGKAFSRISYLAQHWTIHMG

SEQ ID NO: 3733 - protein, 314 aa, Homo sapiens
MAHQASLEHRDLREAKVNLEFKGCLGLLGSRENQEQRVPQENQDTWVYPGFKEKRGTKEIKVKKVFRVKREKMEDREFQGNREFKAIMVQKERGEKGEPGVRGAIGSKGESGVDGLMGPAGPKGQPGDPGPQGPPGLDGKPGREFSEQFIRQVCTDVIRAQLPVLLQSGRIRNCDHCLSQHGSPGIPGPPGPIGPEGPRGLPGLPGRDGVPGLVGVPGRPGVRGLKGLPGRNGEKGSQGFGYPGEQGPPGPPGPEGPPGISKEGPPGDPGLPGKDGDHGKPGIQGQPGPPGICDPSLCFSVIARRDPFRKGPNY

SEQ ID NO: 3734 - protein, 783 aa, Homo sapiens
MSEGDAPTPFSRGSRTRASLPVVRSTNQTKERSLGVLYLRYGDETKQLRMPNEITSADTIRALFVSAFPQQLTMKMLESPSVAIYIKDESRNVYYELNDVRNIQDRSLLKVYNKDPAHAFNHTPKTMNGDMRMQRELVYARGDGPGAPRPGSTAHPPHAIPNSPPSTPVPHSMPPSPSRIPYGGTRSMVVPGNATIPRDRISSLPVSRPISPSPSAILERRDVKPDEDMSGKNIAMYRNEGFYADPYLYHEGRMSIASSHGGHPLDVPDHIIAYHRTAIRSASAYCNPSMQAEMHMEQSLYRQKSRKYPDSHLPTLGSKTPPASPHRVSDLRMIDMHAHYNAHGPPHTMQPDRASPSRQAFKKEPGTLVYIEKPRSAAGLSSLVDLGPPLMEKQVFAYSTATIPKDRETSEKMMKTTANRNHTDSAGTPHVSGGKMLSALESTVPPSQPPPVGTSAIHMSLLEMRRSVAELRLQLQQMRQLQLQNQELLRAMMKKAELEISGKVMETMKRLEDPVQRQRVLVEQERQKYLHEEEKIVKKLCELEDFVEDLKKDSTAASRLVTLKDVEDGAFLLRQVGEAVATLKGEFPTLQNKMRAILRIEVEAVRFLKEEPHKLDSLLKRVRSMTDVLTMLRRHVTDGLLKGTDAAQAAQYMAMEKATAAEVLKSQEEAAHTSGQPFHSTGAPGDAKSEVVPLSGMMVRHAQSSPVVIQPSQHSVALLNPAQNLPHVASSPAVPQEATSTLQMSQAPQSPQIPMNGSAMQSLFIEEIHSVSAKNRAVSIEKA

SEQ ID NO: 3735 - protein, 502 aa, Homo sapiens [sequence omitted]

SEQ ID NO: 3736 - protein, 108 aa, Homo sapiens
MYSECTDRTVITNMYSVLTKYLKYFCKTSYILSHLKWDPGFLPTNIILCLISNMFTFSFKWPYSRLCNWPLKLGVFPHYPLAVITVTSFTNSYSPNQATQVYFSDEGI

SEQ ID NO: 3737 - protein, 489 aa, Homo sapiens
MEDGRCQVLLAKVYSKMEKLGDAITALQQARELQARVLKRVQMEQPDAVPAQKHLAAEICAEIAKHSVAQRDYEKAIKFYREALVHCETDNKIMLELARLYLAQDDPDSCLRQCALLLQSDQDNEAATMMMADLMFRKQDYEQAVFHLQQLLERKPDNYMTLSRLIDLLRRCGKLEDVPRFFSMAEKRNSRAKLEPGFQYCKGLYLWYTGEPNDALRHFNKARKDRDWGQNALYNMIEICLNPDNETVGGEVFENLDGDLGNSTEKQESVQLAVRTAEKLLKELKPQTVQGHVQLRIMENYCLMATKQKSNVEQALNTFTEIAASEKEHIPALLGMATAYMILKQTPRARNQLKRIAKMNWNAIDAEEFEKSWLLLADIYIQSAKYDMAEDLLKRCLRHNRSCCKAYEYMGYIMEKEQAYTDAALNYEMAWKYSNRTNPAVGYKLAFNYLKAKRYVDSIDICHQVLEAHPTYPKIRKDILDKARASLRP

SEQ ID NO: 3738 - protein, 825 aa, Homo sapiens
MEMKHDSKVTTTPIVLHSASSGVEKQVEHGPPVLAFSALSEEIKKEIEPSSSTTTASVTKLDSNLTRAVKEEIPTDSSLITPVDRPVLTKVGKGELGSGLPPLVTSADEHSVLAEEDKVAIKGASPIETSSKHLAWSEAEKEIKFDSLPSVSSIAEHSVLSGVEAKEVKAGLPVIKTSSSQHSDKSEEARVEDKQDLLFSTVCDSERLVSSQKKSLMSTSEVLEPEHELPLSLWGEIKKKETELPSSQNVSPASKHIIPKGKDEETESSSPELENLASGLAPTLLLLSDDKNKPAVEVASTAQGDFPSEKQDVALAELSLVPEKKDKPHQPLELPNAGSEFSSDLGRQSGSIGTKQAKSPITETEDSVLEKGPAELRSREGKEENRELCASSTMPAISELSSLLREESQNEENKPFSPKIVSLESKEPPASVAEGGNPEEFQPFTFSLKGLSEEVSHPADFKKGGNQEIGPLPPTGNLKAQVMGDILDKLSEETGHPNSSQVLQSITEPSKIAPSDLLVEQKKTEKALHSDQTVKLPDVSTSSEDKQDLGIKQFSLMRENLPLEQSKSFMTTKPVDVKETKMEEFFISPKDENWMLGKPENVASQHEQRIAGSVQLGSSGSNELRPGQLKAAVSSKDHTCEVRKQVLPHSAEESHLSSQEAVSALDTSSGNTETLSSKSYSSEEVKLAEEPKSLVLAGNVERNIAEGKEIHSLMESESLLLEKANTELSWPSKEDSQEKIKLPPERFFQKPVSGLSVEQVKSETISSSVKTAHFPAEGVEPALGNEKEAHRSTPPFPEEKPLEESKMVQSKVIDDADEGKKPSPE

SEQ ID NO: 3739 - protein, 205 aa, Homo sapiens
MRAGRAVEGMTAACPAHPQRPVTWTSAPAAGSPHGQSNPRRQPARHGRGLDQQLPRPPGKPWWVPQGHPPSRCVRGSCRRLAARAPRTAASPLAATPLTPAASRPTRAAAWTCGGPQMNWAPCSACQQQGPPSPACAPACPGQSSIRCPPPCGPTMTHHAAFAWLLETTAPPHRAAPATVRPGTQAARRPPGVPLAGWARDGGAW

SEQ ID NO: 3740 - protein, 238 aa, Homo sapiens
MDSSETLDASWEAACSDGARRVRAAGSLPSAELSSNSCSPGCGPEVPPTPPGSHSAFTSSFSFIRLSLGSAGERGEAEGCPPSREAESHCQSPQEMGAKAASLDGPHEDPRCLSRPFSLLATRVSADLAQAARNSSRPERDMHSLPDMDPGSSSSLDPSLAGCGGDGSSGSGDAHSWDTLLRKWEPVLRDCLLRNRRQMEVISLRLKLQKLQEDAVENDDYDKAGTNCFGSTMEASTS

SEQ ID NO: 3741 - protein, 410 aa, Homo sapiens [sequence omitted]

SEQ ID NO: 3742 - protein, 668 aa, Homo sapiens
MTVTYSSKVANATFFGFHRLLLKWRGSIYKLLYREFIVFAVLYTAISLVYRLLLTGVQKRYFEKLSIYCDRYAEQIPVTFVLGFYVTLVVNRWWNQFVNLPWPDRLMFLISSSVHGSDEHGRLLRRTLMRYVNLTSLLIFRSVSTAVYKRFPTMDHVVEAGFMTTDERKLFNHLKSPHLKYWVPFIWFGNLATKARNEGRIRDSVDLQSLMTEMNRYRSWCSLLFGYDWVGIPLVYTQVVTLAVYTFFFACLIGRQFLDPTKGYAGHDLDLYIPIFTLLQFFFYAGWLKVAEQLINPFGEDDDDFETNWCIDRNLQVSLLAVDEMHMSLPKMKKDIYWDDSAARPPYTLAAADYCIPSFLGSTVQMGLSGSDFPDEEWLWDYEKHGHRHSMIRRVKRFLSAHEHPSSPRRRSYRRQTSDSSMFLPRDDLSPARDLLDVPSRNPPRASPTWKKSCFPEGSPTLHFSMGELSTIRETSQTSTLQSLTPQSSVRTSPIKMPLVPEVLITAAEAPVPTSGGYHHDSATSILSSEFTGVQPSKTEQQQGPMGSILSPSEKETPPGGPSPQTVSASAEENIFNCEEDPGDTFLKRWSLPGFLGSSHTSLGNLSPDPMSSQPALLIDTETSSEISGINIVAGSRVSSDMLYLMENLDTKETDIIELNKETEESPK

SEQ ID NO: 3743 - protein, 352 aa, Homo sapiens [sequence omitted]

SEQ ID NO: 3744 - protein, 299 aa, Homo sapiens
MEPPIPQSAPLTPNSVMVQPLLDSRMSHSRLQHPLTILPIDQVKTSHVENDYIDNPSLALTTGPKRTRGGAPELAPTPARCDQDVTHHWISFSGRPSSVSSSSSTSSDQRLLDHMAPPPVADQASPRAVRIQPKVVHCQPLDLKGPAVPPELDKHFLLCEACGKCKCKECASPRTLPSCWVCNQECLCSAQTLVNYGTCMCLVQGIFYHCTNEDDEGSCADHPCSCSRSNCCARWSFMGALSVVLPCLLCYLPATGCVKLAQRGYDRLRRPGCRCKHTNSVICKAASGDAKTSRPDKPF

SEQ ID NO: 3745 - protein, 604 aa, Homo sapiens
MMKSQGLVSFKDVAVDFTQEEWQQLDPSQRTLYRDVMLENYSHLVSMGYPVSKPDVISKLEQGEEPWIIKGDISNWIYPDEYQADGRQDRKSNLHNSQSCILGTVSFHHKILKGVTRDGSLCSILKVCQGDGQLQRFLENQDKLFRQVTFVNSKTVTEASGHKYNPLGKIFQECIETDISIQRFHKYDAFKKNLKPNIDLPSCYKSNSRKKPDQSFGGGKSSSQSEPNSNLEKIHNGVIPFDDNQCGNVFRNTQSLIQYQNVETKEKSCVCVTCGKAFAKKSQLIVHQRIHTGKKPYDCGACGKAFSEKFHLVVHQRTHTGEKPYDCSECGKAFSQKSSLIIHQRVHTGEKPYECSECGKAFSQKSPLIIHQRIHTGEKPYECRECGKAFSQKSQLIIHHRAHTGEKPYECTECGKAFCEKSHLIIHKRIHTGEKPYKCAQCEEAFSRKTELITHQLVHTGEKPYECTECGKTFSRKSQLIIHQRTHTGEKPYKCSECGKAFCQKSHLIGHQRIHTGEKPYICTECGKAFSQKSHLPGHQRIHTGEKPYICAECGKAFSQKSDLVLHQRIHTGERPYQCAICGKAFIQKSQLTVHQRIHTVVKS

SEQ ID NO: 3746 - protein, 194 aa, Homo sapiens
MASAKDANENWHGMPGRVEPILRRSSSESPSDNQAFQAPGSPEEGVRSPPEGAEIPGAEPEKMGGAGTVCSPLEDNGYASSSLSIDSRSSSPEPACGTPRGPGPPDPLLPSVAQAVQHLQVQERYKEQEKEKHHVHLVMYRRLALLQWIRGLQHQLIDQQARLQESFDTILDNRKELIRCLQQRAAPSRPQDQA

SEQ ID NO: 3747 - protein, 748 aa, Homo sapiens
MPHPATGKTVANLLSGKSPRKSAEPSANTTLVSETEEEGSVPAFGAAAKPGMVSAGQADSSSEDTSSSSDETDVEGKPSVKPAQVKASSVSTKESPARKAAPAPGKVGDVTPQVKGGALPPAKRAKKPEEESESSEEGSESEEEAPAGTRSQVKASEKILQVRAASAPAKGTPGKGATPAPPGKAGAVASQTKAGKPEEDSESSSEESSDSEEETPAAKALLQAKASGKTSQVGAASAPAKESPRKGAAPAPPGKTGPAVAKAQAGKREEDSQSSSEESDSEEEAPAQAKPSGKAPQVRAASAPAKESPRKGAAPAPPRKTGPAAAQVQVGKQEEDSRSSSEESDSDREALAAMNAAQVKPLGKSPQVKPASTMGMGPLGKGAGPVPPGKVGPATPSAQVGKWEEDSESSSEESSDSSDGEVPTAVAPAQEKSLGNILQAKPTSSPAKGPPQKAGPVAVQVKAEKPMDNSESSEESSDSADSEEAPAAMTAAQAKPALKIPQTKACPKKTNTTASAKVAPVRVGTQAPRKAGTATSPAGSSPAVAGGTQRPAEDSSSSEESDSEEEKTGLAVTVGQAKSVGKGLQVKAASVPVKGSLGQGTAPVLPGKTGPTVTQVKAEKQEDSESSEEESDSEEAAASPAQVKTSVKKTQAKANPAAARAPSAKGTISAPGKVVTAAAQAKQRSPSKVKPPVRNPQTVPSWRGAQHLCHLWGRPWLQQLRPRQGQRRTQGAVRRSQTVRRRRRRWLR

SEQ ID NO: 3748 - protein, 103 aa, Homo sapiens [sequence omitted]

SEQ ID NO: 3749 - protein, 431 aa, Homo sapiens
MGRPWVAEVVSQGAGIGIQGTITSSTASGDDEETTTTTTIITTTITTVQTPGPCSWNFSGPEGSLDSPTDLSSPTDVGLDCFFYISVYPGYGVEIKVQNISLREGETVTVEGLGGPDPLPLANQSFLLRGQVIRSPTHQAALRFQSLPPPAGPGTFHFHYQAYLLSCHFPRRPAYGDVTVTSLHPGGSARFHCATGYQLKGARHLTCLNATQPFWDSKEPVCIAACGGVIRNATTGRIVSPGFPGNYSNNLTCHWLLEAPEGQRLHLHFEKVSLAEDDDRLIIRNGDNVEAPPVYDSYEVEYLPIEGLLSSGKHFFVELSTDSSGAAAGMALRYEAAHPPTLWVPLWSSAATLATPWSRAPSSSSVLTPTTPSGMRQSQPAEPCAAGRSQTRLAWYSLPTGQSPTVVGRIVSGVCMWKRTSASCWTSECCA

SEQ ID NO: 3750 - protein, 403 aa, Homo sapiens
MDLIRGVLLRLLLLASSLGPGAVSLRAAIRKPGKVGPPLDIKLGALNCTAFSIQWKMPRHPGSPILGYTVFYSEVGADKSLQEQLHSVPLSRDIPTTEEVIGDLKPGTEYHVSIAAYSQAGKGRLSSPRHVTTLSQDSCLPPAAPQQPHVIVVSDSEVALSWKPGASEGSAPIQYYSVEFIRPDFDKKWTSIHERIQMDSMVIKGLDPDTNYQFAVRAMNSHGPSPRSWPSDIIRTLCPEEAGSGRYGPRYITDMGAGEDDEGFEDDLDLDISFEEVKPLPATKGGNKKFLVESKKMSISNPKTISRLIPPTSASLPVTTVAPQPIPIQRKGKNGVAIMSRLFDMPCDETLCSADSFCVNDYTWGGSRCQCTLGKGGESCSEDIVIQYPQFLGPSGWSPRVQL

SEQ ID NO: 3751 - protein, 136 aa, Homo sapiens [sequence omitted]

SEQ ID NO: 3752 - protein, 925 aa, Homo sapiens [sequence omitted]

SEQ ID NO: 3753 - protein, 563 aa, Homo sapiens [sequence omitted]

SEQ ID NO: 3754 - protein, 409 aa, Homo sapiens
MHWGVGFASSRPCVVDLSWNQSISFFGWWAGSEEPFSFYGDIIAFPLQDYGGIMAGLGSDPWWKKTLYLTGGALLAAAAYLLHELLVIRKQQEIDSKDAIILHQFARPNNGVPSLSPFCLKMETYLRMADLPYQNYFGGKLSAQGKMPWIEYNHEKVSGTEFIIDFLEEKLGVNLNKNLGPHERAISRAVTKMVEEHFYWTLAYCQWVDNLNETRKMLSLSGGGPFSNLLRWVVCHITKGIVKREMHGHGIGRFSEEEIYMLMEKDMRSLAGLLGDKKYIMGPKLSTLDATVFGHLAQAMWTLPGTRPERLIKGELINLAMYCERIRRKFWPEWHHDDDNTIYESEESSEGSKTHTPLLDFSFYSRTETFEDEGAENSFSRTPDTDFTGHSLFDSDVDMDDYTDHEQCK

SEQ ID NO: 3755 - protein, 145 aa, Homo sapiens
MEALGKLKQFDAYPKTLEDFRVKTCGGATVTIVSGLLMLLLFLSELQYYLTTEVHPELYVDKSRGDKLKINIDVLFPHMPCAYLSIDAMDVAGEQQLDVEHNLFKQRLDKDGIPVSSEAERHGNQGRGPGLRSQSWMYPSLSASK

SEQ ID NO: 3756 - protein, 326 aa, Homo sapiens [sequence omitted]

SEQ ID NO: 3757 - protein, 526 aa, Homo sapiens
MAGDSTLSTVTHVIVDEVHERDRFSDFLLTKLRDLLQKHPTLKLILSSAALDVNLFIRYFGSCPVIYIQGRPFEVKEMFLEDILRTTGYTNKEMLKYKKEKQQEEKQQTTLTEWYSAQENSFKPESQRQRTVLNVTDEYDLLDDGGDAVFSQLTEKDVNCLEPWLIKEMDACLSDIWLHKDIDAFAQVFHLILTENVSVDYRHSETSATALMVAAGRGFASQVEQLISMGANVHSKASNGWMALDWAKHFGQTEIVDLLESYSASLEFGNLDESSLVQTNGSDLSAEDRELLKAYHHSFDDEKVDLDLIMHLLYNICHSCDAGAVLIFLPGYDEIVGLRDRILFDDKRFADNTHRYQVFMLHSNMQTSDQKKVLKNPPAGVRKIILSTNIAETSITVNDVVFVIDSGKVKEKSFDALNFVTMLKMVWISKASAIQRKGRAGRCRPGICFRLFSRLRFQSISVFQKEIQVFQSVSVFQKNLRLPPNPGLPVNPHLPEKIQVFQPIYVFLKIHVFQKIHVFQKIHVFQ

SEQ ID NO: 3758 - protein, 121 aa, Homo sapiens [sequence omitted]

SEQ ID NO: 3759 - protein, 211 aa, Homo sapiens
MLLEQNLITVDMQKHSLTFWWLVECWPQVFNKLIRRYKYLEKGFEDEVKKLLLFLKGFSESERNKLAMLTGVLLANGTLNASILNSLYNENLVKEGVSAAFAVKLFKSWINEKDINAVAASLRKVSMDNRLMELFPANKQSVEHFTKYFTEAGLKELSEYVRNQQTIGARKELQKELQEQMSRGDPFKDIILYVKEEMKKKTTSQSQLSSE

SEQ ID NO: 3760 - protein, 291 aa, Homo sapiens
MELFNSTYWISLQLNLGTVGFYRTQYSSAMLESLLPGIRDLSLPPVDRLGLQNDLFSLARAGIISTVEVLKVMEAFVNEPNYTVWSDLSCNLGILSTLLSHTDFYEEIQEFVKDVFSPIGERLGWDPKPGEGHLDALLRGLVLGKLGKAGHKATLEEARRRFKDHVEGKQILSADLRSPVYLTVLKHGDGTTLDIMLKLHKQADMQEEKNRIERVLGATLLPDLIQKVLTFALSEEVRPQDTVSVIGGVAGGSKHGRKAAWKFIKDNWEELYNRYQGGFLISRLIKVCEKL

SEQ ID NO: 3761 - protein, 152 aa, Homo sapiens [sequence omitted]

SEQ ID NO: 3762 - protein, 276 aa, Homo sapiens
MDNAGKEREAVQLMAEAEKRVKASHSFPRGLFGGNTRIEEACEMYTRAANMFKMAKNWSAAGNAFCQAAKLHMQLQSKHDSATSFVDAGNAYKKADPQEAINCLNAAIDIYTDMGRFTIAAKHHITIAEIYETELVDIEKAIAHYEQSADYYKGEESNSSANKCLLKVAAYAAQLEQYQKAIEIYEQVGANTMDNPLLKYSAKDYFFKAALCHFIVDELNAKLALEKYEEMFPAFTDSRECKLLKKLLEAHEEQNSEEQSPSTKPWRRSNVAPSSA

SEQ ID NO: 3763 - protein, 203 aa, Homo sapiens
METLSQDSLLECQICFNYYSPRRRPKLLDCKHTCCSVCLQQMRTSQKDVRCPWCRGVTKLPPGFSVSQLPDDPEVLAVIAIPHTSEHTPVFIKLPSNGCYMLPLPISKERALLPGDMGCRLLPGSQQKSVTVVTIPAEQQPLQGGAPQEAVEEEQDRRGVVKSSTWSGVCTVILVACVLVFLLGIVLHNMSCISKRFTVISCG

SEQ ID NO: 3764 - protein, 265 aa, Homo sapiens
MECLDEMSNLEKQFTDLKDQLYKERLSQVDAKLQEVIAGKAPEYLEPLATLQENMQIRTKVAGIYRELCLESVKNKYECEIQASRQHCESEKLLLYDTVQSELEEKIRRLEEDRHSIDITSELWNDELQSRKKRKDPFSPDKKKPVVVSGPYIVYMLQDLDILEDWTTIRKAMATLGPHRVKTEPPVKLEKHLHSARSEEGRLYYDGEWYIRGQTICIDKKDECPTSAVITTINHDEVWFKRPDGSKSKLYISQLQKGKYSIKHS

SEQ ID NO: 3765 - protein, 103 aa, Homo sapiens
MSLCSRVTVLSPGTVPEFSKLKPGLHSPSQTPAELSNHPLLPSLQEPWHPCSGESLKSNLKVPTVFPQIWVSMSMGHQSGEPHACPCLAQDCHSVRFISLSDP

SEQ ID NO: 3766 - protein, 159 aa, Homo sapiens
MSPWIWILENFQCPGWNVLLGSSCPEKSQDMRRWEREGGGVKRAGASCPRGVMAAQAAPSRQDRIPMGDMRTMVISRHQLCPRASCACAVGLLIVQASVHIVLYGRSCTRGFSVSGPTLSAWTSFFFFPGKDIRKKVTPPVFGVLESLACLQASESSVC

SEQ ID NO: 3767 - protein, 519 aa, Homo sapiens
MYLIRESHASGSSSVTSSCSLPSESPTLRQWRPCSCLPHPKPGVISQLERGDEPWVLDVQGTSGKEHLRVNSPALGTRTEYKELTSQETFGEEDPQGSEPVEACDHISKSEGSLEKLVEQRGPRAVTLTNGESSRESGGNLRLLSRPVPDQRPHKCDICEQSFEQRSYLNNHKRVHRSKKTNTVRNSGEIFSANLVVKEDQKIPTGKKLHYCSYCGKTFRYSANLVKHQRLHTEEKPYKCDECGKAFSQSCEFINHRRMHSGEIPYRCDECGKTFTRRPNLMKHQRIHTGEKPYKCGECGKHFSAYSSLIYHQRIHTGEKPYKCNDCGKAFSDGSILIRHRRTHTGERPFECKECGKGFTQSSNLIQHQRIHTGEKPYKCNECEKAFIQKTKLVEHQRSHTGEKPYECNDCGKVFSQSTHLIQHQRIHTGEKPYKCSECGKAFHNSSRLIHHQRLHHGEKPYRCSDCKKAFSQSTYLIQHRRIHTGEKPYKCSECGKAFRHSSNMCQHQRIHLREDFSM

SEQ ID NO: 3768 - protein, 245 aa, Homo sapiens
MALTIPKRVLLKQEHFKVAREHRQKVDLELEAQIDILRDNKKKYENILKLAQTLSTQLFQMVHTQRQLGDAFADLSLKSLELHEEFGYNADTQKLLAKNGETLLGAINFFIASVNTLVNKTIEDTLMTVKQYESARIEYDAYRTDLEELNLGPRDANTLPKIEQSQHLFQAHKEKYDKMRNDVSVKLKFLEENKVKVLHNQLVLFHNAIAAYFAGNQKQLEQTLKQFHIKLKTPGVDAPSWLEEQ

SEQ ID NO: 3769 - protein, 524 aa, Homo sapiens [sequence omitted]

SEQ ID NO: 3770 - protein, 131 aa, Homo sapiens
MLMSKAGRSERRNESPGSAWKCLWGLLLPDPQDLCHWSILNFRYMCSFQKFRESSCATEAQPGLQQLTKFEEILNKNNKKRNNLGLNVNKRELCLLSGLFIESSIRNVCLCLASYQWALNCIPSHRYATDN

SEQ ID NO: 3771 - protein, 123 aa, Homo sapiens [sequence omitted]

SEQ ID NO: 3772 - protein, 610 aa, Homo sapiens
MPSARGKSKSKAPITFGDLAIYFSQEEWEWLSPIQKDLYEDVMLENYRNLVSLGLSFRRPNVITLLEKGKAPWMVEPVRRRRAPDSGSKCETKKLPPNQCNKSGQSICQKLVSAQQKAPTRKSGCNKNSVLVKPKKGHSGKKPLKCNDCGKTFSRSFSLKLHQNIHTGEKPFECSNCRKAFRQISSILLHQRIHSGKKSHECNKCGESFNQRTTLILHMRIHDGKEILDCGKALSQCQSFNIHQKIHVVGNVCQCRKCGRAFNQMSSLLLHKKIHNGKKTHKYNKCGRGFKKKSVFVVHKRIHAGEKIPENAKALSQSLQQRSHHLENPFKCRKCGKLFNRISPLMLHQRIHTSEKPYKCDKCDKFFRRLSTLILHLRIHNGEKLYRCNKCEKVCNRHSSLIQHQKVHTKKKKLFECKECGKMFSGTANLKIHQNIHSEEKPFKCNKCSKVFGRQSFLIEHQRIHTGEKPYQCEECGKAFSHRISLTRHKRIHTEDRPYECDQCGKAFSQSAHLAQHERIHTGEKPYTCKTCGKAFSQRTSLILHERSHTGEKPYECNECGKAFSSGSDLIRHQRSHSSEKPYECSKCGKAYSRSSSLIRHQNTHSEEKA

SEQ ID NO: 3773 - protein, 787 aa, Homo sapiens
MLKTESSGERTTLRSASPHRNAYRTEFQALKSTFDKPKSDGEQKTKEGEGSQQSRGRKYGSNVNRIKNLFMQMGMEPNENAAVIAKTRGKGGHSSPQRRMKPKEFLEKTDGSVVKLESSVSERISRFDTMYDGPSYSKFTETRKMFERSVHESGQNNRYSPKKEKAGGSEPQDEWGGSKSNRGSTDSLDSLSSRTEAVSPTVSQLSAVFENTDSPSAIISEKAEDNEYSVTGHYPLNLPSVTVTNLDTFGHLKDSNSWPPSNKRGVDTEDAHKSNATPVPEVASKSTSLASIPGEEIQQSKEPEDSTSNQQTPDSIDKDGPEEPCAESKAMPKSEIPSPQSQLLEDAEANLVGREAAKQQRKELAGGDFTSPDASASSCGKEVPEDSNNFDGSHVYMHSDYNVYRVRSRYNSDWGETGTEQDEEEDSDENSYYQPDMEYSEIVGLPEEEEIPANRKIKFSSAPIKVFNTYSNEDYDRRNDEVDPVAASAEYELEKRVEKLELFPVELEKDEDGLGISIIGMGVGADAGLEKLGIFVKTVTEGGAAQRDGRIQVNDQIVEVDGISLVGVTQNFAATVLRNTKGNVRFVIGREKPGQVSEVAQLISQTLEQERRQRELLEQHYAQYDADDDETGEYATDEEEDEVGPVLPGSDMAIEVFELPENEDMFSPSELDTSKLSHKFKELQIKHAVTEAEIQKLKTKLQAAENEKVRWELEKTQLQQNIEENKERMLKLESYWIEAQTLCHTVNEHLKETQSQYRALEKKYNKAKKLIKDFQQKELDFIKRQEA

SEQ ID NO: 3774 - protein, 652 aa, Homo sapiens
MEKIKELLPDWGGQHHGLRGVLAAALFASCLWGALIFTLHVALRLLLSYHGWLLEPHGAMSSPTKTWLALVRIFSGRHPMLFSYQRSLPRQPVPSVQDTVRKYLESVRPILSDEDFDWTAVLAQEFLRLQASLLQWYLRLKSWWASNYVSDWWEEFVYLRSRNPLMVNSNYYMMDFLYVTPTPLQAARAGNAVHALLLYRHRLNRQEIPPTLLMGMRPLCSAQYEKIFNTTRIPGVQKDYIRHLHDSQHVAVFHRGRFFRMGTHSRNSLLSPRALEQQFQRILDDPSPACPHEEHLAALTAAPRGTWAQVRTSLKTQAAEALEAVEGAAFFVSLDAEPAGLTREDPAASLDAYAHALLAGRGHDRWFDKSFTLIVFSNGKLGLSVEHSWADCPISGHMWEFTLATECFQLGYSTDGHCKGHPDPTLPQPQRLQWDLPDQIHSSISLALRGAKILSENVDCHVVPFSLFGKSFIRRCHLSSDSFIQIALQLAHFRDRGQFCLTYESAMTRLFLEGRTETVRSCTREACNFVRAMEDKEKTDPQCLALFRVAVDKHQALLKAAMSGQGVDRHLFALYIVSRFLHLQSPFLTQVHSEQWQLSTSQIPVQQMHLFDVHNYPDYVSSGGGFGPADDHGYGVSYIFMGDGMITFHISS

SEQ ID NO: 3775 - protein, 150 aa, Homo sapiens
MADTSPPTKLEHPRSTSDCCAGSKNFNPVDLSFLGSMGVGSTDQDHLAPWFQPPFQGSEWFCLSGIPDNSGVRKKLLQLAQCLPKWPLSFVLEIQGPCGVGTQGISLSVDCEDHGKSVVSGPECTPTHGMVPHGFPWLGEGVPQPLALPR

SEQ ID NO: 3776 - protein, 630 aa, Homo sapiens [sequence omitted]

SEQ ID NO: 3777 - protein, 110 aa, Homo sapiens
MEDIFGELLLQLHQQYPGDIGCFAIYFLNLLTLKPGEAMFLEANVPHAYLKGGEPHFSSEPHCHPCWALFPYLDKGRRRVVKETPKDLAALTSEGPWAQQATAGRDDECI

SEQ ID NO: 3778 - protein, 667 aa, Homo sapiens [sequence omitted]

SEQ ID NO: 3779 - protein, 184 aa, Homo sapiens
MCPLFSCQWEGRLEVVVPHLRQIHRVDILQGAEIVFLATDMHLPAPADWIIMHSCLGHHFLLVLRKQERHEGHPQFFATMMLIGTPTQADCFTYRLEDIVLVQLGDTRVTGMENGDGGGARSVGPKSRAGRGMEWGDAGGRCLGLGNGVVSGTPVGTVLEGSPEWAAARSEHLAAGDGQGRRIA

SEQ ID NO: 3780 - protein, 273 aa, Homo sapiens
MSPACRVNSKTKPTTIFMAAAWTGRRNSSPDRMWLTTERRKGDAGSPMTLLHQPSGLTSQPQVLYQNNGLYSSHGFGTRPLDPGTAGPRVWYRPIPSHMPSLHNIPVPETNYLGNTPTMPFSSLPPTDESIKYTIYNSTGIQIGAYNYMEIGGTSSSLLDSTNTNFKEEPAAKYQAIFDNTTSLTDKHLDPIRENLGKHWKNCARKLGFTQSQIDEIDHDYERDGLKEKVYQMLQKWVMREGIKGATVGKLAQALHQCSRIDLLSSLIYVSQN

SEQ ID NO: 3781 - protein, 940 aa, Homo sapiens
MTVHSSVHSNNLNSMPAAEKGKDTLKSAYDDTENDLKGAAIHISKGMLHEEKPGEQILEGGSESESAQKAAGNQMNDRKIQQESLGSAPLMGDDHPNASRDSVEGDALVNGAKLHTLSVEHQREELKEELVLKTQNQPRFSSPDEIDLPRELEDEVPILGRNLPWQQERDVAATASKQMSEKIRLSEGEAKEDSLDEEFFHHKAMQGTEVGQTDQTDSTGGPAFLSKVEEDDYPSEELLEDENAINAKRSKEKNPGNQGRQFDVNLQVPDRAVLGTIHPDPEIEESKQETSMILDSEKTSETAAKGVNTGGREPNTMVEKERPLADKKAQRPFERSDFSDSIKIQTPELGEVFQNKDSDYLKNDNPEEHLKTSGLAGEPEGELSKEDHENTEKYMGTESQGSAAAEPEDDSFHWTPHTSVEPGHSDKREDLLIISSFFKEQQSLQRFQKYFNVHELEALLQEMSSKLKSAQQESLPYNMEKVLDKVFRASESQILSIAEKMLDTRVAENRDLGMNENNIFEEAAVLDDIQDLIYFVRYKRSTAEETATLVMAPPLEEGLGGAMEEMQPLHEDNFSREKTAELNVQVPEEPTHLDQRVIGDTHASEVSQKPNTEKDLDPGPVTTEDTPMDAIDANKQPETAAEEPASVTPLENAILLIYSFMFYLTKSLVATLPDDVQPGPDFYGLPWKPVFITAFLGIASFAIFLWRTVLVVKDRVYQVTEQQISEKLKTIMKENTELVQKLSNYEQKIKESKKHVQETRKQNMILSDEAIKYKDKIKTLEKNQEILDDTAKNLRVMLESEREQNVKNQDLLQQEIEDWSKLHAELSEQIKSFEKSQKDLEVALTHKDDNINALTNCITQLNLLECESESEGQNKGGNDSDELANGEVGGDRNEKMKNQIKQMMDVSRTQTAISVVEEDLKLLQLKLRASVSTKCNLEDQ

SEQ ID NO: 3782 - protein, 260 aa, Homo sapiens
MRRVRQGLQPQLPAAAAPEVPHRGEALRVHRVRQGVLPQVHPQRARPHPQRGAALPVPAVWAALHPRVLAPEAPPAARAGGCPGRRRGAGRPARSCAEAPGGGPAPRVPGVREAVPTQLPAAAAPAPTHGREAVRVRGVRQGLRSQVQPHSAPEDPHQGEALRVHRVRQGVPQELHAERALPAPQRREAIPVPRLREGLQPAVHPHPAPEGARPRARGGHRGQAGALLGFLMTGTTGRGFTLEAHPSRRGPSAEIQNPLS

SEQ ID NO: 3783 - protein, 142 aa, Homo sapiens [sequence omitted]

SEQ ID NO: 3784 - protein, 101 aa, Homo sapiens [sequence omitted]

SEQ ID NO: 3785 - protein, 106 aa, Homo sapiens [sequence omitted]

SEQ ID NO: 3786 - protein, 124 aa, Homo sapiens [sequence omitted]

SEQ ID NO: 3787 - protein, 184 aa, Homo sapiens
MIHCEATHCGKILSHKQSLIHYVNVETGEKTYVCVECGKSFLKKSQIIIHQRIHTGEKPYDCGACGKAFSEKSHLIAHQRTHTGEKPYDCSECGKGFSQKSSLIIHQRVHSGEKPYECSECEKAFSQKSPLIIHQRIYTGEKPYECRVWESLFPESQLIIHHRAHTGEKPCKCTECGKAFCFIH

SEQ ID NO: 3788 - protein, 895 aa, Homo sapiens [sequence omitted]

SEQ ID NO: 3789 - protein, 485 aa, Homo sapiens
MRTSSKEKDNTIIRLKSRLQDLEEAFENAYKLSDDKEAQLKQENKMFQDLLGEYESLGKEHRRVKDALNTTENKLLDAYTQISDLKRMISKLEAQVKQVEHENMLSLRHNSRIHVRPSRANTLATSDVSRRKWLIPGAEYSIFTGQPLDTQDSNVDNQLEETCSLGHRSPLEKDSSPGSSSTSLLIKKQRETSDTPIMRALKELDEGKIFKNWGTQTEKEDTSNINPRQTETSVNASRSPEKCAQQRQKRLNSASQRSSSLPPSNRKSSTPTKREIMLTPVTVAYSPKRSPKENLSPGFSHLLSKNESSPIRFDILLDDLDTVPVSTLQRTNPRKQLQFLPLDDSEEKTYSEKATDNHVNHSSCPEPVPNGVKKVSVRTAWEKNKSVSYEQCKPVSVTPQGNDFEYTAKIRTLAETERFFDELTKEKDQIEAALSRMPSPGGRITLQTRLNQEALEDRLERINRELGSVRMTLKKFHVLRTSANL

SEQ ID NO: 3790 - protein, 541 aa, Homo sapiens
MRLKMTTRNFPEREVPCDVEVERFTREVPCLSSLGDGWDCENQEGHLRQSALTLEKPGTQEAICEYPGFGEHLIASSDLPPSQRVLATNGFHAPDSNVSGLDCDPALPSYPKSYADKRTGDSDACGKGFNHSMEVIHGRNPVREKPYKYPESVKSFNHFTSLGHQKIMKRGKKSYEGKNFENIFTLSSSLNENQRNLPGEKQYRCTECGKCFKRNSSLVLHHRTHTGEKPYTCNECGKSFSKNYNLIVHQRIHTGEKPYECSKCGKAFSDGSALTQHQRIHTGEKPYECLECGKTFNRNSSLILHQRTHTGEKPYRCNECGKPFTDISHLTVHLRIHTGEKPYECSKCGKAFRDGSYLTQHERTHTGEKPFECAECGKSFNRNSHLIVHQKIHSGEKPYECKECGKTFIESAYLIRHQRIHTGEKPYGCNQCQKLFRNIAGLIRHQRTHTGEKPYECNQCGKAFRDSSCLTKHQRIHTKETPYQCPECGKSFKQNSHLAVHQRLHSREGPSRCPQCGKMFQKSSSLVRHQRAHLGEQPMET

SEQ ID NO: 3791 - protein, 134 aa, Homo sapiens [sequence omitted]

SEQ ID NO: 3792 - protein, 365 aa, Homo sapiens
MPILLFLIDTSASMNQRTDLGTSYLDIAKGAVELFLKLRARDPASRGDRYMLVTYDEPPYCIKAGWKENHATFMSELKNLQASGLTTLGQALRSSFDLLNLNRLISGIDNYGQGRNPFFLEPSILITITDGNKLTSTAGVQEELHLPLNSPLPGSELTKEPFRWDQRLFALVLRLPGVASTEPEQLGSVPTDESAITQMCEVTGGRSYCVRTQRMLNQCLESLVQKVQSGVVINFEKTGPDPLPIGEDGLMDSSRPSNSFAAQPWHSCHKLIYVRPNSKTGVPVGHWPIPESFWPDQNLPSLPPRTSHPVVRFSCVDCEPMVIDKLPFDKYELEPSPLTQYILERKSPHTCWQMTCLKFTSLSQI

SEQ ID NO: 3793 - protein, 112 aa, Homo sapiens
MIIPGKGFLVLCNPKGRNSPMGGRILLGMKKLLFPCHECPAREQGGSVREGLSSWRKWDSKSRMLRLSGSQRGGSKCGMWVALWFSGSVVVPSTADFMTPHLSPSHIVYPSV

SEQ ID NO: 3794 - protein, 358 aa, Homo sapiens
MLFVDDMAEPRETPEHPLKQIKFLLGRKEEEAVLVGGEWSPSLDGLDPQADPQVLVRTAIRCAQAQTGIDLSGCTKWWRFAEFQYLQPGPPRRLQTVVVYLPDVWTIMPTLEEWEALCQQKAAEAAPPTQEAQGETEPTEQAPDALEQAADTSRRNAETPEATTQQETDTDLPEAPPPPLEPAVIARPGCVNLSLHGIVEDRRPKERISFEVMVLAELFLEMLQRDFGYRVYKMLLSLPEKVVSPPEPEKEEAAKEEATKEEEAIKEEVVKEPKDEAQNEGPATESEAPLKEDGLLPKPLSSGGEEEEKPRGEASEDLCEMALDPELLLLRDDGEEEFAGAKLEDSEVRSVASNQSEM

SEQ ID NO: 3795 - protein, 1237 aa, Homo sapiens
MEDFRGIAEESFPSFLTNSLFGNSGILENVTLSSNLGLPVAVSTLARDRSSTDNRYPDIQASYLVEGRFSVPSASSPRSQSDAEPRERLQLSFQDDDSISRKKSYVESQRLSNALSKQSALQMETAGPEEEPAGATESLQGQDLFNRASPLEQAQDSPIDFHLQSWMNNKEPKIVVLDAGKHFEDKTLKSDLSHTSLLENEKLILPTSLEDSSDDDIDDEMFYDDHLEAYFEQLAIPGMIYEDLEGPEPPEKGFKLPTNGLRQANENGSLNCKFQSENNSSLISLDSHSSETTHKESEESQVICLPGTSNSIGTGDSRRYTDGEFFAQRSEALGCLGGGNNVKRPSFGYFIRSPEKREPIALIRKSDVSRGNLEKEMAHLNHDLYSGDLNEQSQAQLSEGSITLQVEAVESTSQVEENDVTLTADKGKTEDTFFMSNKPQRYKDKLPDSGDSMLRISTIASAIAEASVNTDPSQLAAMIKALSNKTRDKTFQEDEKQKDYSHVRHFLPNDLEKSNGSNALDMEKYLKKTEVSRYESALENFSRASMSDTWDLSLPKEQTTQDIHPVDLSATSVSVRAPEENTAAIVYVENGESENQESFRTINSSNSVTNRENNSAVVDVKTCSIDNKLQDVGNDEKATSISTPSDSYSSVRNPRITSLCLLKDCEEIRDNRENQRQNECVSEISNSEKHVTFENHRIVSPKNSDLKNTSPEHGGRGSEDEQESFRPSTSPLSHSSPSEISGTSSSGCALESFGSAAQQQQPPCEQELSPLVCSPAGVSRLTYVSEPESSYPTTATDDALEDRKSDITSELSTTIIQGSPAALEERAMEKLREKVPFQNRGKGTLSSIIQNNSDTRKATETTSLSSKPEYVKPDFRWSKDPSPKSGNLLETSEVGWTSNPEELDPIRLALLGKSGLSCQVGSATSHPVSCQEPIDEDQRISPKDKSTAGREFSGQVSHQTTSENQCTPIPSSTVHSSVADMQNMPAAVHALLTQPSLSAAPFAQRYLGTLPSTGSTTLPQCHAGNATVCGFSGGLPYPAVAGEPVQNSVAVGICLGSNIGSGWMGTSSLCNPYSNTLNQNLLSTTKPFPVPSVGTNCGIEPWDSGVTSGLGSVRVPEELKLPHACCVGIASQTLLSVLNPTDRWLQVSIGVLSISVNGEKVDLSTYRCLVFKNKAIIRPHATEEIKVLFIPSSPGVFRCTFSVASWPCSTDAETIVQAEALASTVTLTAIAESPVIE

SEQ ID NO: 3796 - protein, 153 aa, Homo sapiens [sequence omitted]

SEQ ID NO: 3797 - protein, 163 aa, Homo sapiens [sequence omitted]

SEQ ID NO: 3798 - protein, 369 aa, Homo sapiens
MKLEASCGTATSEVPKPEKKTARDAEPSSETRPQEVEAEPRSGSGPEAEAEPLDFVVATERESEEVLAISGGIYGGLDYLPSRYHSWLRDPDRTVVLAKRNGGVIALESVNVIDAGETVLVEGLRVAPWERGKGVAGLLQRFCSQLVKRQHPGVKVARLTRDDQLGPRELKKYRLITKQGILLVRFNASALLAGLGARLAALRTSGTFSPLPTEAVSEAGGDVARLLLSPSVQRDVLPGGTIIQDWQPYRPSESNLRLLAAKGLEWRVDSRARPRVLTLCTRPFPIPHGGDGTWRYLNIDAFGSDGAQVQSQLLWHLQRQAPRLVGLNVMCQLFLEPQLWSQLADFCQVGLGLELVKGYTEQYLLEADI

SEQ ID NO: 3799 - protein, 695 aa, Homo sapiens
MGTKMADLDSPPKLSGVQQPSEGVGGGRCSEISAELIRSLTELQELEAVYERLCGEEKVVERELDALLEQQNTIESKMVTLHRMGPNLQLIDANLKLLQEAEQRLKAIVAEKFAIATKEGDLPQVERFFKIFPLLGLHEEGLRKFSEYLCKQVASKAEENLLMVLGTDMSDRRAAVIFADTLTLLFEGIARIVETHQPIVETYYGPGRLYTLIKYLQVECDRQVEKVVDKFIKQRDYHQQFRHVQNNLMRNSTTEKIEPRELDPILTEVTLMNARSELYLRFLKKRISSDFEVGDSMASEEVKQEHQKCLDKLLNNCLLSCTMQELIGLYVTMEEYFMRETVNKAVALDTYEKGQLTSSMVDDVFYIVKKCIGRALSSSSIDCLCAMINLATTELESDFRDVLCNKLRMGFPATTFQDIQRGVTSAVNIMHSSLQQGKFDTKGIESTDEAKMSFLVTLNNVEVCSENISTLKKTLESDCTKLFSQGIGGEQAQAKFDSCLSDLAAVSNKFRDLLQEGLTELNSTAIKPQVQPWINSFFSVSHNIEEEEFNDYEANDPWVQQFILNLEQQMAEFKASLSPVIYDSLTGLMTSLVAVELEKVVLKSTFNRLGGLQFDKELRSLIAYLTTVTTWTIRDKFARLSQMATILNLERVTEILDYWGPNSGPLTWRLTPAEVRQVLALRIDFRSEDIKRLRL

SEQ ID NO: 3800 - protein, 663 aa, Homo sapiens [sequence omitted]

SEQ ID NO: 3801 - protein, 516 aa, Homo sapiens
MALPQGHLTFRDVAIEFSQAEWKCLDPAQRALYKDVMLENYRNLVSLGISLPDLNINSMLEQRREPWSGESEVKIAKNSDGRECIKGVNTGSSYALGSNAEDKPIKKQLGVSFHLHLSELELFPDERVINGCNQVENFINHSSSVSCLQEMSSSVKTPIFNRNDFDDSSFLPQEQKVHLREKPYECNEHSKVFRVSSSLTKHQVIHTVEKPYKCNSCGKVFSRNSHLAEHCRIHTGEKPYKCNVCGKVFSYNSNFARHQRIHTREKPYECNECGKVFSNNSYLARHQRIHAEEKPYKCNECGKGFSHKSSLANHWRIYTGEKPYKCDECGKAFYRIALLVRHQKIHTGEKPYKCNECGKVFIQNSHLAQHWRIHTGEKPYKCNECGKVFNQLSNLARHRRIHTGEKPYKCNECGKAFSEYSGLSAHLVIHTGEKPYKCSECGKAFRHKLSLTNHQRIHTGERPYKCNECGKVFNRIAHLARHRKIHTGEKPYKCNECGKAFSRISYLAQHWTIHMG

SEQ ID NO: 3802 - protein, 132 aa, Homo sapiens [sequence omitted]

SEQ ID NO: 3803 - protein, 356 aa, Homo sapiens [sequence omitted]

SEQ ID NO: 3804 - protein, 515 aa, Homo sapiens [sequence omitted]

SEQ ID NO: 3805 - protein, 182 aa, Homo sapiens [sequence omitted]

SEQ ID NO: 3806 - protein, 244 aa, Homo sapiens
MAPRPLGPLVLALGGAAAVLGSVLFILWKTYFGRGRERRWDRGEAWWGAEAARLPEWDEWDPEDEEDEEPALEELEQREVLVLGLDGAGKSTFLRVLSGKPPLEGHIPTWGFNSVRLPTKDFEVDLLEIGGSQNLRFYWKEFVSEVDVLVFVVDSADRLRLPWARQELHKLLDKDPDLPVVVVANKQDLSEAMSMGELQRELGLQAIDNQREVFLLAASIAPAGPTFEEPGTVHIWKLLLELLS

SEQ ID NO: 3807 - protein, 587 aa, Homo sapiens [sequence omitted]

SEQ ID NO: 3808 - protein, 102 aa, Homo sapiens
MALGLLTPPTGQPVFLLLGFLKQPQDSGHLDFAPIASQDTLLLWFATPAFSSRTPLLFCLTLGLDLLQHSQWPRLPPWGSVEQDRCCIQTLPLGSSLFQSCP

SEQ ID NO: 3809 - protein, 113 aa, Homo sapiens
MKPKKAATFPCTIPNLHVPTIGLLFMSGVIWLNFILIYWNALSSHKSQELLIPVYPNELPKPINIISIQILSFPICIEQMHSITKHLAGVVAHNCIPALQERPRKEDCLSPGV

SEQ ID NO: 3810 - protein, 136 aa, Homo sapiens
MAGWGLVDVSGAPEPWRIPHGIPLPALSGLCGVRRSPSSRFSFFPPQQRNWRKDIKLSAVDLSAEIFPESMVVLNYLHVSSIFNSGVGLFLISSQKCSALGEGTSPLACHFPGVLYHFDGTLWSAENALSWHASRL

SEQ ID NO: 3811 - protein, 130 aa, Homo sapiens
MSSLYPRLCHLSLQFLPLKNRSIFLQSLMLGFELCLALATGILICMTKNLESVNSFVLAHSCYHHENKPRPGCCFQQKIRDTKSKVELPRHAHARLTNPQLTHRSMKINDCCIKPLRFVVTCYAAFCDNN

SEQ ID NO: 3812 - protein, 346 aa, Homo sapiens [sequence omitted]

SEQ ID NO: 3813 - protein, 114 aa, Homo sapiens [sequence omitted]

SEQ ID NO: 3814 - protein, 878 aa, Homo sapiens
MYEGKHIHFSEVDNKPLCSYSPKLCKQRRLNGYAFCIRHVLEDKTAPFKQCEYVAKYNSQRCTNPIPKSEDRRYCNSHLQVLGFIPKKERKKKNDPIDEVKVRHQMDTMAFSLTVPTLALKMPNGLDGMSLSPPGARVPLHYLETELEDPFAFNEEDDDLKKGATVRKKLQSKLAQNRQRQRETEILKVRQEHFSPPPAPSQQQPPQQHSHLSPLSTSLKPPAPPQGSVCKSPQPQNTSLPMQGVAPTTHTIAQARQLSHKRPLPLLPSSRAPTVDPPRTDRILMKATAFSPHFSCISRLQRLVKLCTQKHQLDTDLFPHLGLDWSEESGEEPEDSEQASPYQVAWSIRETLRYQRHVSDDDDAESRSSRVTQLCTYFQQKYKHLCRLERAESRQKKCRHTFRKALLQAASKEPECTGQLIQELRRAACSRTSISRTKLREVEPAACSGTVKGEQCANKALPFTRHCFQHILLNHSQQLFSSCTAKFADGQQCSVPVFDITHQTPLCEEHAKKMDNFLRGDNSRKVQHQQQRKPRKKTKPPALTKKHKKKRRRGPRRPQKPIPPAVPQGNLSMPASVSLPVEASHIRSPSTPELSADELPDDIANEIADIPHDLELNQEDFSDVLPRLPDDLQDFDFFEGKNGDLLPTTEEAEELERALQAVTSLECLSTIGVLAQSDGVPVQELSDRGIGVFSTGTGASGIQSLSREVNTDLGELLNGRIVHDNFSSLELDENLLRSATLSNPPTPLAGQIQGQFSAPANVGLTSATLISQSALGERAFPGQFHGLHDGSHASQRPHPAQLLSKADDLITSRQQYSSDHSHSSPHGSHYDSEHVPSPYSDHITSPHTTSYSGDNMAAPVCFRGYHRPASVAWGLLLN

SEQ ID NO: 3815 - protein, 441 aa, Homo sapiens
MKKKTFKGLIRIFRKGVIAVLAANRLKILGQSCATLFTWMESFKEGIGMLVCTGEPQDKHKFPKHQKEQLRCLQALSWLTSSDLLAAIISSMAELQDVIGKADPNSRICGHLLIGAAKNSFAKLMDKISLVMECIPLHSSRSITYVEKDSLVQRLAHGLHKVNTLALKYGLRGHVPITKSTASLQKQILGFTQRLHAAEVERRSLRLEVTEFKRSVNEMKKELDKAQGLQMQLNEFKQSKLITHEKFESACEELNNALLREEQAQMLLNEQAQQLQELNYKLELHSSEEADKNQTLGEAVKSLSEAKMELRRKDQSLRQLNRHLTQLEQDKRRLEENIHDAESALRMAAKDKECVANHMRAVENTLHKVRDQISLSWSAASRNDFTLQLPKLHLETFAMEGLKGGPEVVACQVRVQWCDHSSLQSQMPGLKQSSCLSLLST

SEQ ID NO: 3816 - protein, 100 aa, Homo sapiens [sequence omitted]

SEQ ID NO: 3817 - protein, 156 aa, Homo sapiens [sequence omitted]

SEQ ID NO: 3818 - protein, 602 aa, Homo sapiens
MPVFTYVSINPNSGDIYALRSFNHEQTKAFEFKVLAKDGGLPSLQSNATVRVIILDVNDNTPVITAPPLINGTAEVYIPRNSGIGYLVTVVKAEDYDEGENGRVTYDMTEGDRGFFEIDQVNGEVRTTRTFGESSKSSYELIVVAHDHGKTSLSASALVLIYLSPALDAQESMGSVNLSLIFIIALGSIAGILFVTMIFVAIKCKRDNKEIRTYNCRIAEYSYGHQKKSSKKKKISKNDIRLVPRDVEETDKMNVVSCSSLTSSLNYFDYHQQTLPLGCRRSESTFLNVENQNTRNTSANHIYHHSFNSQGPQQPDLIINGVPLPETENYSFDSNYVNSRAHLIKSSSTFKDLEGNSLKDSGHEESDQTDSEHDVQRSLYCDTAVNDVLNTSVTSMGSQMPDHDQNEGFHCREECRILGHSDRCWMPRNPMPIRSKSPEHVRNIIALSIEATAADVEAYDDCGPTKRTFATFGKDVSDHPAEERPTLKGKRTVDVTICSPKVNSVIREAGNGCEAISPVTSPLHLKSSLPTKPSVSYTIALAPPARDLEQYVNNVNNGPTRPSEAEPRGADSEKVMHEVSPILKEGRNKESPGVKRLKDIVL

SEQ ID NO: 3819 - protein, 108 aa, Homo sapiens [sequence omitted]

SEQ ID NO: 3820 - protein, 437 aa, Homo sapiens
MGERLFESAEGSQCGETFTQVPEDMLNKKTLPGVKSCESGTCGEIFMGYSSFNRNIRTDTGHQPHKCQKFLEKPYKHKQRRKALSHSHCFRTHERPHTREKPFDCKECEKSFISPASIRRYMVTHSGDGPYKCKFCGKALDCLSLYLTHERTHTGEKRYECKQCGKAFSWHSSVRIHERTHTGEKPYECKECGKSFNFSSSFRRHERTHTGEKPYKCKECGKAFNCPSSFHRHERTHTGEKPYECKLYGKALSRLISFRRHMRMHTGERPHKCKICGKAFYSPSSFQRHERSHTGEKPYKCKQCGKAFTCSTSFQYHERTHTGEKPDGCKQCGKAFRSAKYIRIHGRTHTGEKPYECKQCGKAFHCVSSFHRHERTHAGEKPYECKHCGKAFTCSIYIRIHERIHTGEKPYQCKECGKAFIRSSYCRKHERTHTINI

SEQ ID NO: 3821 - protein, 339 aa, Homo sapiens; identical to SEQ ID NO: 3642

SEQ ID NO: 3822 - protein, 400 aa, Homo sapiens
METSRSPSPQFAPQKLTDKPPLLIQDEDSTRIERVMDNNTTVKMVPIKIVHSESQPEKESRQSLACPAEPPALPHGLEKDQIKTLSTSEQFYSRFCLYTRQGAEPEAPHRAQPAEPQPLGTQVPPEKDRCTSPPGLSYMKAKEKTVEDLKSEELAREIVGKDKSLADILDPSVKIKTTMDLMEGIFPKDEHLLEEAQQRRKLLPKIPSPRSTEERKEEPSVPAAVSLATNSTYYSTSAPKAELLIKMKDLQEQQEHEEDSGSDLDHDLSVKKQELIESISRKLQVLREARESLLEDVQANTVLGAEVEAIVKGVCKPSEFDKFRMFIGDLDKVVNLLLSLSGRLARVENALNNLDDGASPGDRQSLLEKQRVLIQQMCVDFMLDTYHSPINRSSCLTVTK

SEQ ID NO: 3823 - protein, 294 aa, Homo sapiens
MLTGDIIPSSGNILIRNKTGSLGHVDSHSSLVGYCPQEDALDDLVTVEEHLYFYARVHGIPEKDIKETVHKLLRRLHLMPFKDRATSMCSYGTKRKLSTALALIGKPSILLLDEPSSGMDPKSKRHLWKIISEEVQNKCSVILTSHSMEECEALCTRLAIMVNGKFQCIGSLQHIKSRFGRGFTVKVHLKNNKVTMETLTKFMQLHFPKTYLKDQHLSMLEYHVPVTAGGVANIFDLLETNKTALNITNFLVSQTTLEEVFINFAKDQKSYETADTSSQGSTISVDSQDDQMES

SEQ ID NO: 3824 - protein, 773 aa, Homo sapiens
MDVTSSSGGGGDPRQIEETKPLLGGDVSAPEGTKMGAVPCRRALLLCNGMRYKLLQEGDIQVCVIRHPRTFLSKILTSKFLRRWEPHHLTLADNSLASATPTGYMENSVSYSAIEDVQLLSWENAPKYCLQLTIPGGTVLLQAANSYLRDQWFHSLQWKKKIYKYKKVLSNPSLWEVVLKEIRTLVDMALTSPLQDDSINQAPLEIVSKLLSENTNLTTQEHENIIVAIAPLLENNHPPPDLCEFFCKHCRERPRSMVVIEVFTPVVQRILKHNMDFGKCPRLRLFTQEYILALNELNAGMEVVKKFIQSMHGPTGHCPHPRVLPNLVAVCLAAIYSCYEEFINSRDNSPSLKEIRNGCQQPCDRKPTLPLRLLHPSPDLVSQEATLSEARLKSVVVASSEIHVEVERTSTAKPALTASAGNDSEPNLIDCLMVSPACSTMSIELGPQADRTLGCYVEILKLLSDYDDWRPSLASLLQPIPFPKEALAHEKFTKELKYVIQRFAEDPRQEVHSCLLSVRAGKDGWFQLYSPGGVACDDDGELFASMVHILMGSCYKTKKFLLSLAENKLGPCMLLALRGNQTMVEILCLMLEYNIIDNNDTQLQIISTLESTDVGKRMYEQLCDRQRELKELQRKGGPTRLTLPSKSTDADLARLLSSGSFGNLENLSLAFTNVTSACAEHLIKLPSLKQLNLWSTQFGDAGLRLLSEHLTMLQVLNLCETPVTDAGLLALSSMKSLCSLNMNSTKLSADTYEDLKAKLPNLKEVDVRYTEAW

SEQ ID NO: 3825 - protein, 112 aa, Homo sapiens [sequence omitted]

SEQ ID NO: 3826 - protein, 745 aa, Homo sapiens [sequence omitted]

SEQ ID NO: 3827 - protein, 164 aa, Homo sapiens [sequence omitted]

SEQ ID NO: 3828 - protein, 717 aa, Homo sapiens
MRAQQCTLPQPRALRRDRQGIRSALPALHARSRQTAAPASVPAPAGAREPRGQRRSGQRTISRALALCAPGQLSPGHPLSKMKKLQGAHLRKPVTPDLLMTPSDQGDVDLDVDFAAHRGNWTGKLDFLLSCIGYCVGLGNVWRFPYRAYTNGGGAFLVPYFLMLAICGIPLFFLELSLGQFSSLGPLAVWKISPLFKGAGAAMLLIVGLVAIYYNMIIAYVLFYLFASLTSDLPWEHCGNWWNTELCLEHRVSKDGNGALPLNLTCTVSPSEEYWSRYVLHIQGSQGIGSPGEIRWNLCLCLLLAWVIVFLCILKGVKSSGKVVYFTATFPYLILLMLLVRGVTLPGAWKGIQFYLTPQFHHLLSSKVWIEAALQIFYSLGVGFGGLLTFASYNTFHQNIYRDTFIVTLGNAITSILAGFAIFSVLGYMSQELGVPVDQVAKAGPGLAFVVYPQAMTMLPLSPFWSFLFFFMLLTLGLDSQFAFLETIVTAVTDEFPYYLRPKKAVFSGLICVAMYLMGLILTTDGGMYWLVLLDDYSASFGLMVVVITTCLAVTRVYGIQRFCRDIHMMLGFKPGLYFRACWLFLSPATLLALLVYSIVKYQPSEYGSYRFPPWAELLGILMGLLSCLMIPAGMLVAVLREEGSLWERLQQASRPAMDWGPSLEENRTGMYVATLAGSQSPKPLMVHMRKYGGITSFENTAIEVDREIAEEEESMM

SEQ ID NO: 3829 - protein, 576 aa, Homo sapiens
MFTGGMYESQQASVTMHDVDAESFEVLVDYCYTGRVSLSEANVERLYAASDMLQLEYVREACASFLARRLDLTNCTAILKFADAFGHRKLRSQAQSYIAQNFKQLSHMGSIREETLADLTLAQLLAVLRLDSLDVESEQTVCHVAVQWLEAAPKERGPSAAEVFKCVRWMHFTEEDQDYLEGLLTKPIVKKYCLDVIEGALQMRYGDLLYKSLVPVPNSSSSSSSSNSLVSAAENPPQRLGMCAKEMVIFFGHPRDPFLCCDPYSGDLYKVPSPLTCLAHTRTVTTLAVCISPDHDIYLAAQPRTDLWVYKPAQNSWQQLADRLLCREGMDVAYLNGYIYILGGRDPITGVKLKEVECYNVKRNQWALVAPLPHSFLSFDLMVIRDYLYALNSKRMFCYDPSHNMWLKCVSLKRNDFQEACVFNEEIYCICDIPVMKVYNPVRAEWRQMNNIPLVSETNNYRIIKHGQKLLLITSRTPQWKKNRVTVYEYDIRGDQWINIGTTLGLLQFDSNFFCLSARVYPSCLEPGQSFLTEEEEIPSESSTEWDLGGFSEPDSESGSSSSLSDDDFWVRVAPQ

SEQ ID NO: 3830 - protein, 184 aa, Homo sapiens
MPVKGASSLLFLPLPPSAWQLCLLSKRRVHPIRTPLPFHSWIKALVISNQKVPERERPEGTGVLSDGCLGQSQEGEPLLSPPALAHFPLHARCCGSSWAWPGSAGEAIRMVSGAPFLCFLDGLDGLPCSSPMAALPAPMAALPARRQRQEHIEGGSQGCGVRSPAPCRGKPGSATSSTLRLCPA

SEQ ID NO: 3831 - protein, 242 aa, Homo sapiens [sequence omitted]

SEQ ID NO: 3832 - protein, 643 aa, Homo sapiens [sequence omitted]

SEQ ID NO: 3833 - protein, 109 aa, Homo sapiens
MLPIVSYCCEGGKVFRDNVFNSSGSFVYLGTCPLVQGFQRSKRPCLKEQGLAPFSRAAHSPNLLLLLFFFTTFLFAPKCTQAALPDQNDSVLRMQGLLSFPVSHNSRET

SEQ ID NO: 3834 - protein, 716 aa, Homo sapiens
MEDCLHTSSENLSKLVSWAHSHGTICSLIPNLKHLLSEGSHGNLTAMWGCSAGHAYHWPLTATCRAGSQERVCFQDNRSFNSDSPSIIGVPSETQTSPVERYPGRPVKAKLDCNRTRDSCDFSYCSEPSELDETVEEYEDENTLFDMVCESSVTDEDSDFEPQTQRPQSIARKRPGVVPSSLHSSSQTQMVDECSNDVIIKKIKQEIPEDYYIVANAELTGGVDGPALSLTQMAKPKPQTHAGPSCVGSAKLIPHVTSAISTELDPHGMSASPSVISRPIVQKTARVSLASPNRGPPGTHGTNQQVAMQMPVSTSHPNKQISIPLSALQLPGQDEQVASEEFLSHLPSQVSSCEVALSPSVNTEPEVSSSQQQPPVAPAITTEATAQCIPAYSTKLNKFPVFNINDDLNDLCTSAVSPNTTKATRYALNVWRYWCMTNGLKDHTDITKIPAVKLNELLENFYVTVKKSDGSDFLATSLHAIRRGLDRILKNAGVGFSITSSTFSSSTKKLKEKLWVLSKAGMSGARSRNIVYFSLSDEEEMWQAGCLGDDSPITLLSTVVKYNSQYLNMRTLQEHADLMYGDIELLKDPQNQPYFARTDSVKRESRSGSTRVCHGKIYHEHSRGHKQCPYCLLYKYMYIHRPPTQMEAKSPFYLTARKEATDMGSVWYEEQRMGLRSLRGIVPNLAKKVKLENCENFTFVSFTQVSRRLGSHSCCQ

SEQ ID NO: 3835 - protein, 170 aa, Homo sapiens [sequence omitted]

SEQ ID NO: 3836 - protein, 753 aa, Homo sapiens
MESEGKTVLSKMMGSPKSEFTKWTRINEITSEPDRITVSGHFHRLSRELEKEKEDTQGFTLGESPESEDDDSGDGMDVAGLDIETSFSSSSTLVALSVGSNPQSSSGLDCGNDTDITTKVFSTEPHHSEHKLQTKTLNTLHLQSEPPECSIGGNNLENSLCALSPELGASNFNDQKSSGIEYTKVVKGLTKIHSLPRSVFMKATKDGQCESQDPRIELTLNKPDFTSLIGSQAALIKSGLGFVKSTSWHHSDLLRKGGEESLRAKSEHEQKTSHQLQKAMPFLQNRGPTPKPDLLRENNNPVEFKTTASVLPNQVSVITKQTRPEKVQSAKLEHLRPHRVEPTLVTENSGNKTGMSTIAKCDGERDDTTQNITEVAAVKSISPEVSASRRKLDFNSPGGSSPVENSDCSTNSRLSFSPENILIQNQDIVREAAVQGDGQKQRQPQATDLDSSGTHGSEMLPATEVTVSGGFSVEETSCGDTGRSGGEALAVANDSTSTPQNANGLWKLKSATPGDALPECFGTTDTTFSSAFCRKHGETQDTSQSSLPGTLHCYTGIREGGDDTEVESEAFSCSEGSEQQDAPDGSQKNLGDTDAAVAEVRPSLEVGYLTSALQDFNISTFSELDRLSTSEVVMFLESCQLGDYSSGDSVSECSSKGTLSKEMNKELKASEIGEKYRKQPCEEETLGTCEEWIESEEDDYSLKNTSQLTQCSLETLSEVLTKIRQELQTNSEDCNGKDTGSLLLLNVNNNMTT

SEQ ID NO: 3837 - protein, 397 aa, Homo sapiens
MVKETQYYDILGVKPSASPEEIKKAYRKLALKYHPDKNPDEGEKFKLISQAYEVLSDPKKRDVYDQGGEQAIKEGGSGSPSFSSPMDIFDMFFGGGGRMARERRGKNVVHQLSVTLEDLYNGVTKKLALQKNVICEKCEGVGGKKGSVEKCPLCKGRGMQIHIQQIGPGMVQQIQTVCIECKGQGERINPKDRCESCSGAKVIREKKIIEVHVEKGMKDGQKILFHGEGDQEPELEPGDVIIVLDQKDHSVFQRRGHDLIMKMKIQLSEALCGFKKTIKTLDNRILVITSKAGEVIKHGDLRCVRDEGMPIYKAPLEKGILIIQFLVIFPEKHWLSLEKLPQLEALLPPRQKVRITDDMDQVELKEFCPNEQNWRQHREAYEEDEDGPQAGVQCQTA

SEQ ID NO: 3838 - protein, 968 aa, Homo sapiens
MADLEVYKNLSPEKVERCMSVMQSGTQMIKLKRGTKGLVRLFYLDEHRTRLRWRPSRKSEKAKILIDSIYKVTEGRQSEIFHRQAEGNFDPSCCFTIYHGNHMESLDLITSNPEEARTWITGLKYLMAGISDEDSLAKRQRTHDQWVKQTFEEADKNGDGLLNIEEIHQLMHKLNVNLPRRKVRQMFQEADTDENQGTLTFEEFCVFYKMMSLRRDLYLLLLSYSDKKDHLTVEELAQFLKVEQKMNNVTTDYCLDIIKKFEVSEENKVKNVLGIEGFTNFMRSPACDIFNPLHHEVYQDMDQPLCNYYIASSHNTYLTGDQLLSQSKVDMYARVLQEGCRCVEVDCWDGPDGEPVVHHGYTLTSKILFRDVVETINKHAFVKNEFPVILSIENHCSIQQQRKIAQYLKGIFGDKLDLSSVDTGECKQLPSPQSLKGKILVKGKKLPYHLGDDAEEGEVSDEDSADEIEDECKFKLHYSNGTTEHQVESFIRKKLESLLEESQIRDKEDPDSFTVRALLKATHEGLNAHLKQSPDVKESGKKSHGRSLMTNFGKHKKTTKSRSKSYSTDDEEDTQQSTGKEGGQLYRLGRRRKTMKLCRELSDLVVYTNSVAAQDIVDDGTTGNVLSFSETRAHQVVQQKSEQFMIYNQKQPTRIYPSAYRIDSSNFNPLPYWNAGCQLVALNYQSEGRMMQLNRAKFKANGNCGYVLKPQQMCKGTFNPFSGDPLPANPKKQLILKVISGQQLPKPPDSMFGDRGEIIDPFVEVEIIGLPVDCCKDQTRVVDDNGFNPVWEETLTFTVHMPEIALVRFLVWDHDPIGRDFVGQRTVTFSSLVPGYRHVYLEGLTEASIFVHITINEIYGKNRQLQGLKGLFNKNPRHSSSENNSHYVRKRSIGDRIPRRTASAPAKGRKKSKMGFQEMVEIKDSVSEATRDQDGVLRRTTRSLQARPVSMPVDRNLLGALSLPVSET

SEQ ID NO: 3839 - protein, 106 aa, Homo sapiens
MILGSPPLVSFGCPRATSVFFNVRRSKFPVVKMEPSESCPWQRTWFCSLGRSQVHLPRGFEPACTPIARLRFQVTPRFWPRKSASAPSWHLSMQVAARDLETPAPG

SEQ ID NO: 3840 - protein, 121 aa, Homo sapiens
MFRRLLMRNQNTGALLSTMSSTIVWVKRSMPPPQVCWWMVSLILPTIRTVSALGCSPMLTGIPLLKTPGGILEKEFIFIMLEGRCMPNALVTVASLCKVGTATTIMDFILLLFARSLVGVV

SEQ ID NO: 3841 - protein, 719 aa, Homo sapiens [sequence omitted]

SEQ ID NO: 3842 - protein, 606 aa, Homo sapiens
MIPRRPREGPRADSSQRAPSLLTRSPVGGDAAGQKKEDTGGGGRNAGQHWARLRGESGLSLERHRSTLTQASSMTPHSGPRSTTSQASPAQRDTAQAASTREIPRASSPHRITQRDTSRASSTQQEISRASSTQQETSRASSTQEDTPRASSTQEDTPRASSTQWNTPRASSPSRSTQLDNPRTSSTQQDNPQTSFPTCTPQRENPRTPCVQQDDPRASSPNRTTQRENSRTSCAQRDNPKASRTSSPNRATRDNPRTSCAQRDNPRASSPSRATRDNPTTSCAQRDNPRASRTSSPNRATRDNPRTSCAQRDNPRASSPSRATRDNPTTSCAQRDNPRASRTSSPNRATRDNPRTSCAQRDNPRASSPNRAARDNPTTSCAQRDNPRASRTSSPNRATRDNPRTSCAQRDNPRASSPNRATRDNPTTSCAQRDNPRASRTSSPNRATRDNPRTSCAQWDNPRASSPNRTTQQDSPRTSCARRDDPRASSPNRTIQQENPRTSCALRDNPRASSPSRTIQQENPRTSCAQRDDPRASSPNRTTHHTHTHTHTHTQTHRHIRTHVHTCTHGYTHTHTHTHTAYLSTPLALGLTLHLLQDFICEEIFI

SEQ ID NO: 3843 - protein, 217 aa, Homo sapiens
MWQPATERLQHFQTMLKSKLNVLTLKKEPLPAVIFHEPEAIELCTTTPLMKTRTHSGCKVTYLGKVSTTGMQFLSGCTEKPVIELWKKHTLAREDVFPANALLEIRPFQVWLHHLDHKGEATVHMDTFQVARIAYCTADHNVSPNIFAWVYREINDDLSYQMDCHAVECESKLEAKKLAHAMMEAFRKTFHSMKSDGRIHSNSSSEEVSQELESDDG

SEQ ID NO: 3844 - protein, 1443 aa, Homo sapiens
MELAHSLLLNEEALAQITEAKRPVFIFEWLRFLDKVLVAANKTDVKEKQKKLVEQLTGLISSSPGPPTRKLLAKNLAALYSIGDTFTVFQTLDKCNDIIRNKDDTAAYLPTKLAAVACVGAFYEKMGRMLGSAFPETVNNLLKSLKSAESQGRSEILMSLQKVLSGLGGAAASSHRDIYKNARSLLTDRSMAVRCAVAKCLLELQNEAVFMWTAELENIATLCFKALENSNYGVRVAVSKLLGTVMATALMPKQATVMRQNVKRATFDEVLELMATGFLRGGSGFLKSGGEMLKVGGSVNREVRVGVTQAYVVFVTTLGGQWLERSFATFLSHVLDLVSHPRATQTHVEAVYSRRCVSFILRATVGSLLGEKAQIAAAKEICQAIGKQMKAVEAVVNDTSGENKSGAADIAASQHVMVCALQELGSLVQSLNATASPLIQEASIGLLEIVTSVLLHPSMAARLAAAWCLRCVAVALPFQLTPFLDRCAERLNNLKTSPEAVSGYSFAMAALLGGVHQCPLGIPHAKGKMVVSIAEDLLRTAAQNSRLSLQRTQAGWLLLGALMTLGPSVVRYHLPKMLLLWRNVFPRSLKELEAEKARGDSFTWQVTLEGRAGALCAMRSFVAHCPELLTEDVIRKLMTPIECAMTMMSHIPSVMKAHGAHLKASAAMVRLRLYDILALLPPKTYEGSFNALLRELVAEFTLTDNSANTTTSLLRSLCHYDDSVLLGSWLQETDHKSIEDQLQPNSASGSGALEHDPSSIYLRIPAGEAVPGPLPLGVSVIDASVALFGVVFPHVSYKHRLQMLDHFAECVKQAKGVRQQAVQLNIFTAVLSALKGLAENKSTLGPEEVRKSALTLVMGPLDNPNPILRCAAGEALGRMAQVVGEATFIARMAQYSFDKLKSARDVVSRTGHSLALGCLHRYVGGIGSGQHLKTSVSILLALAQDGTSPEVQTWSLHSLALIVDSSGPMYRGYVEPTLSLVLTLLLTVPPSHTEVHQCLGRCLGAIITTVGPELQGNGATTSTIRSSCLVGCAITQDHSDSLVQAAAISCLQQLHMFAPRHVNLSSLVPSLCVHLCSSHLLLRRAAVACLRQLAQREAAEVCEYAMSLAKNTGDKESSSANVSPFAPGVSSRTDIHCRHQGVNITETGLEGLLFGMLDRETDRKLCSDIHDTLGHMLSSLAVEKLSHWLMLCKDVLAASSDMSTATLLSSGKDEEAEKKDEMDDDTMFTTLGEEDKSKPFVAPRWATRVFAADCLCRIINLCENADQAHFDLALARSAKLRNPTNDLLVLHLSDLIRMAFMAATDHSNQLRMAGLQALEDIIKKFASVPEPEFPGHVILEQYQANVGAALRPAFSQDTPSDIIAKACQVCSTWIGSGVVSDLNDLRRVHNLLVSSLDKVQAGKGSSSQLYRESATTMEKLAVLKAWAEVYVVAMNIKKEAESN

SEQ ID NO: 3845 - protein, 287 aa, Homo sapiens; identical to SEQ ID NO: 3127

SEQ ID NO: 3846 - protein, 566 aa, Homo sapiens [sequence omitted]

SEQ ID NO: 3847 - protein, 601 aa, Homo sapiens
MAASADLSKSSPTPNGIPSSDPASDAMDPFHACSILKQLKTMYDEGQLTDIVVEVDHGKTFSCHRNVLAAISPYFRSMFTSGLTESTQKEVRIVGVEAESMDLVLNYAYTSRVILTEANVQALFTAASIFQIPSIQDQCAKYMISHLDPQNSIGVFIFADHYGHQELGDRSKEYIRKKFLCVTKEQEFLQLTKDQLISILDSDDLNVDREEHVYESIIRWFEHEQNEREVHLPEIFAKCIRFPLMEDTFIEKIPPQFAQAIAKSCVEKGPSNTNGCTQRLGMTASEMIICFDAAHKHSGKKQTVPCLDIVTGRVFKLCKPPNDLREVGILVSPDNDIYIAGGYRPSSSEVSIDHKAENDFWMYDHSTNRWLSKPSLLRARIGCKLVYCCGKMYAIGGRVYEGDGRNSLKSVECYDSRENCWTTVCAMPVAMEFHNAVEYKEKIYVLQGEFFLFYEPQKDYWGFLTPMTVPRIQGLAAVYKDSIYYIAGTCGNHQRMFTVEAYDIELNKWTRKKDFPCDQSINPYLKLVLFQNKLHLFVRATQVTVEEHVFRTSRKNSLYQYDDIADQWMKVYETPDRLWDLGRHFECAVAKLYPQCLQKVL

SEQ ID NO: 3848 - protein, 216 aa, Homo sapiens
MAILPGEAPVPGPGWPEPDAGGASVALGLPVPVCSSSASALQEQHLLDELSRAQVWSGPSRGALGSALPPELPPTGILPTASPSPLAPDPPRIILPTVPQPPATIIQQLPQQPLIAQIPPPQAFPTQRSGSIKEDMVELLLLQNAQVHQLVLQNWMLKALPPALQDPPHVPPRVPRAARPRLPAVHHHHHHHHAVWPPGAATVLQPAPSLWTPGPP

SEQ ID NO: 3849 - protein, 693 aa, Homo sapiens
MSPRQTQASLISPSRPASTPPDSPPLQAPLSLPASPPLQTSLSPAVSPLSSPLTIHPLQALSSLASHSPQAPLSSLIMPPLETQSSLAPPSLQTPPASLTTPPLENLPSLAPPPLQTASAPLTTPHLETPPCPAPCPLQAPPSPLTTPPPETPSPIATPPPQAPPALASPPLQGLPSPPLSPLATPPPQAPPALALPPLQAPPSPPASPPLSPLATPSPQAPNALAVHLLQAPFSPPPSPPVQAPFSPPASPPVSPSATPPSQAPPSLAAPPLQVPPSPPASPPMSPSATPPPQAPPPLAAPPLQVPPSPPASPPMSPSATPPPRVPPLLAAPPLQVPPSPPASLPMSPLAKPPPQAPPALATPPLQALPSPPASFPGQAPFSPSASLPMSPLATPPPQAPPVLAAPLLQVPPSPPASPTLQAPRRPPTPGPDTSVSGPRLTLALAPGPPPPPSRSPSSTLSGPDLAGHSSSATSTPEELRGYDSGPEGGAAASPPPDAELAACHPAAWSRGPAPPLAFRGAPGAPLPWPPATGPGSADGLCTIYETEGPESATPAPGALDPGPSPGTSGGKAAAGAGAGASSRSPKQARLGELPLGALQASVVQHLLSRTLLLAAAEGAAGGSGGGPGGAEGGGVTGGARAALSDAELGRWAELLSPLDESRASITSVTSFSPGDVASPQGDWTVVEVETFH

SEQ ID NO: 3850 - protein, 829 aa, Homo sapiens
MAERGGAGGGPGGAGGGSGQRGSGVAQSPQQPPPQQQQQQPPQQPTPPKLAQATSSSSSTSAAAASSSSSSTSTSMAVAVASGSAPPGGPGPGRTPAPVQMNLYATWEVDRSSSSCVPRLFSLTLKKLVMLKEMDKDLNSVVIAVKLQGSKRILRSNEIVLPASGLVETEVMQHPNEGALVLGLHSNVKDVSVPVAEIKIYSLSSQPIDHEGIKSKLSDRSPDIDNYSEEEEESFSSEQEGSDDPLHGQDLFYEDEDLRKVKKTRRKLTSTSAITRQPNIKQKFVALLKRFKVSDEVGFGLEHVSREQIREVEEDLDELYDSLEMYNPSDSGPEMEETESILSTPKPKLKPFFEGMSQSSSQTEIGSLNSKGSLGKDTTSPMELAALEKIKSTWIKNQDDSLTETDTLEITDQDMFGDASTSLVVPEKVKTPMKSSKTDLQGSASPSKVEGVHTPRQKRSTPLKERQLSKPLSERTNSSDSERSPDLGHSTQIPRKVVYDQLNQILVSDAALPENVILVNTTDWQGQYVAELLQDQRKPVVCTCSTVEVQAVLSALLTRIQRYCNCNSSMPRPVKVAAVGGQSYLSSILRFFVKSLANKTSDWLGYMRFLIIPLGSHPVAKYLGSVDSKYSSSFLDSGWRDLFSRSEPPVSEQLDVAGRVMQYVNGAATTHQLPVAEAMLTCRHKFPDEDSYQKFIPFIGVVKVGLVEDSPSTAGDGDDSSVVSLTVPSTSPPSSSGLSRDATATPPSSPSMSSALAIVGSPNSPYGDVIGLQVDYWLGHPGERRREGDKRDASSKNTLKSVFRSVQVSRLPHSGEAQLSGTMAMTVVT

SEQ ID NO: 3851 - protein, 108 aa, Homo sapiens
MSLEETKEQILKLEEKLLALQEEKHQLFLQLKKVLHEEEKRRRKEQSDLTTLTSAAYQQSLTVHTGTHLLSMQGSPGGHNRPGTLMAADRAKQMFGPQVLTVRVGLDA

SEQ ID NO: 3852 - protein, 1047 aa, Homo sapiens [sequence omitted]

SEQ ID NO: 3853 - protein, 106 aa, Homo sapiens
MHEAAKDRWQRTECGARRWPRPAGGCVWAQAGTGAQGLVLLLVAGPGRGRLAQPLGALVPARRRRRQGSRWVPRLPAETQTDVQEATAAASAPSSVNCAEYFRLWR

SEQ ID NO: 3854 - protein, 345 aa, Homo sapiens [sequence omitted]

SEQ ID NO: 3855 - protein, 114 aa, Homo sapiens [sequence omitted]

SEQ ID NO: 3856 - protein, 106 aa, Homo sapiens
MAAAIGLASENGLPGKFTQPDLKQLLRGRGAAPGVLAGKQLAAVREPLASRVLTEECVGQLGTGFTLDSGWRLLTLAESSQRALVYVQNGAICMGVGKITEPGPLG

SEQ ID NO: 3857 - protein, 125 aa, Homo sapiens
MIVTKSLVMLQPLQIIGESIMKRDRTSVIDVANFSDIVHTLQFIGELIVERNLTNVKNVMKLSVSNQTFKDIGEFILERNLTGVMNVARPLVGSHTLHAIVDFILERNLTSVMSVARPSVEIQPL

SEQ ID NO: 3858 - protein, 531 aa, Homo sapiens
MVDVGKWPIFTLLSPQEIASIRKVCVFGTSASEALYVTDNDEVFVFGLNYSNCLGTGDNQSTLVPKKLEGLCGKKIKSLSYGSGPHVLLSTEDGVVYAWGHNGYSQLGNGTTNQGIAPVQVCTNLLIKQVVEVACGSHHSMALAADGEVFAWGYNNCGQVGSGSTANQPTPRKVTNCLHIKRVVGIACGQTSSMAVLDNGEVYGWGYNGNGQLGLGNNGNQLTPVRVAALHSVCVNQIVCGYAHTLALTDEGLLYAWGANTYGQLGTGNKNNLLSPAHIMVEKERVVEIAACHSAHTSAAKTQGGHVYMWGQCRGQSVILPHLTHFSCTDDVFACFATPAVSWRLLSVEHEDFLTVAESLKKEFDSPETADLKFRIDGKYIHVHKAVLKIRCEHFRSMFQSYWNEDMKEVIEIDQFSYPVYRAFLQYLYTDTVDLPPEDAIGLLDLATSYCENRLKKLCQHIIKRGITVENAFSLFSAAVRYDAEDLEEFCFKFCINHLTEVTQTAAFWQMDGPLLKEFIAKASKCGAFKN

SEQ ID NO: 3859 - protein, 328 aa, Homo sapiens
MAAHVGASRTPQEVMEHYVSMYIHGNLGKACIPDTIPNRVTDHTCPSGGPLSPSLTTPLPPLDISVAEQQQLGYMPLRDDYEIEYDQDAETLISGLSVNYDDDDVEIELKRAHVDMYVRKLKERQRRKNIARDYNLVPAFLGKDKKEKEKALKRKITKEEKELRLKLRPLYQFMSCKEFDDLFENMHKEKMLRAKIRELQRYRRNGITKMEESAEYEAARHKREKRKENKNLAGSKRGKEDGKDSEFAAIENLPGFELLSDREKVLCSSLNLSPARYVTVKTIIIKDHLQKRQGIPSKSRLPSYLDKVLKKRILNFLTESGWISRDAS

SEQ ID NO: 3860 - protein, 155 aa, Homo sapiens [sequence omitted]

SEQ ID NO: 3861 - protein, 163 aa, Homo sapiens [sequence omitted]

SEQ ID NO: 3862 - protein, 520 aa, Homo sapiens [sequence omitted]

SEQ ID NO: 3863 - protein, 123 aa, Homo sapiens [sequence omitted]

SEQ ID NO: 3864 - protein, 152 aa, Homo sapiens [sequence omitted]

SEQ ID NO: 3865 - protein, 148 aa, Homo sapiens [sequence omitted]

SEQ ID NO: 3866 - protein, 217 aa, Homo sapiens
MPERNSTSVKNVVKALLGPHTLLNIREFILERNPTYVKNVVKLLTNPQPLIYIREFILHKNTTNVKNVVKPLSGPHPLMNIREFMLERNPSHAKNVAMSLPHPQTLLNIREFIQERNPTNVKNVENPLIGPQLLRHIRESILERNPTHVKNVEKPLIGPQPLMYTREFTLEKIPTNVKIVAKPLKCLQTCIIIRKFILERNPTYVNNVAKPLNSPHT

SEQ ID NO: 3867 - protein, 241 aa, Homo sapiens
MSTAIREVGVWRQTRTLLLKNYLIKCRTKKSSVQEILFPLFFLFWLILISMMHPNKKYEEVPNIELNPMDKFTLSNLILGYTPVTNITSSIMQKVSTDHLPDVIITEEYTNEKEMLTSSLSKPSNFVGVVFKDSMSYELRFFPDMIPVSSIYMDSRAGCSKSCEAAQYWSSGFTVLQASIDAAIIQLKTNVSLWKELESTKAVIMGETAVVEIDTFPRGVILIYLVIAFSPFGYFLAIHIV

SEQ ID NO: 3868 - protein, 122 aa, Homo sapiens
MTCQQFIHYHRDLCIRNIVKERRCGAKTSAGTFCGCDLVSWLIEVGLASDRGEAVIYGDRLVQGGVIQHITNEYEFRDEYLFYRFLQKSPEQSPPAINANTLQQERYKEIEHSSPPSHSPKT

SEQ ID NO: 3869 - protein, 73 aa, Homo sapiens
MCFVKQMLEGSMLVKSHHHSLISSTQGHKHCGRPQGPLPRKTRDLCSLVYLLTFPPLLSYDPAKSPSARNTQE

SEQ ID NO: 3870 - protein, 308 aa, Homo sapiens [sequence omitted]

SEQ ID NO: 3871 - protein, 264 aa, Homo sapiens
MNPFVLIDLAGAFALCITYMLIEINNYFAVDTASAIAIALMTFGTMYPMSVYSGKVLLQTTPPHVIGQLDKLIREVSTLDGVLEVRNEHFWTLGFGSLAGSVHVRIRRDANEQMVLAHVTNRLYTLVSTLTVQIFKDDWIRPALLSGPVAANVLNFSDHHVIPMPLLKGTDDLNPVTSTPAKPSSPPPEFSFNTPGKNVNPVILLNTQTRPYGFGLNHGHTPYSSMLNQGLGVPGIGATQGLRTGFTNIPSRYGTNNRIGQPRP

SEQ ID NO: 3872 - protein, 106 aa, Homo sapiens
MTSPLCNLSLWGLYQRHGTSVWYPDCEISLWAKEGPTDKVASQPHPRNPRDFTPAGCHWGTELSQLSLPSCLAFVNHQSGERVSGLARIWAGWKSLSRSEIKGLGI

SEQ ID NO: 3873 - protein, 144 aa, Homo sapiens [sequence omitted]

SEQ ID NO: 3874 - protein, 738 aa, Homo sapiens
MTWEIECTSEMLKKLSSKVMTKVIKKKIILAIQQLGNGEWTQGLQKRLKHLKGSIQLFEAKLDKGARMLWELAIDFSPRCSENPEKIIATEQNTCAMEKSGRIYTEIIRIWDIVLDHCKLADSIKAICNAYNRGLSCVLRKKLKGINKGQVSANMKIQKRIPRCYVEDTEAEKGREHVNPEYFPPASAVETEYNIMKFHSFSTNMAFNILNDTTATVEYPFRVGELEYAVIDLNPRPLEPIILIGRSGTGKTTCCLYRLWKKFHVYWEKAEQAGSPLLAKQVWLKRRLEVEPGKESPGGEEEGEEEDEEEEDSIEVETVESIDEQEYEACAGGAGVEPAGDGQAAEVCAPEHPHQLEHLHQIFVTKNHVLCQEVQRNFIELSKSTKATSHYKPLDPNIHKLQDLRDENFPLFVTSKQLLLLLDASLPKPFFLRNEDGSLKRTIIGWSAQEESTIPSWQEDEEEAEVDGDYSEEDKAVEMRTGDSDPRVYVTFEVFKNEVWPKMTKGRTAYNPALIWKEIKSFLKGSFEALSCPHGRLTEEVYKKLGRKRCPNFKEDRSEIYSLFSLYQQIRSQKGYFDEEDVLYNISRRLSKLRVLPWSIHELYGDEIQDFTQAELALLMKCINDPNSMFLTGDTAQSIMKGVAFRFSDLRSLFHYASRNTIDKQCAVRKPKKIHQLYQNYRSHSGILNLASGVVDLLQFYFPESFDRLPRDSGLFDGPKPTVLESCSVSDLAILLRG

SEQ ID NO: 3875 - protein, 350 aa, Homo sapiens
MATVVHILDSRTGGSLVAHIKVGETYHQRKEGVTHQQWYLFNDFLIEPIDKHEAVQFDMNWKVPAILYYVKRNLNSRYNLNIKNPIEASVLLAEASLARKQRKTHTTFIPLMLNEMPQIGDLVGLDAEFVTLNEEEAELRSDGTKSTIKPSQMSVARITCVRGQGPNEGIPFIDDYISTQEQVVDYLTQYSGIKPGDLDAKISSKHLTTLKSTYLKLRFLIDIGVKFVGHGLQKDFRVINLMVPKDQVLDTVYLFHMPRKRMISLRFLAWYFLDLKIQGETHDSIEDARTALQLYRKYLELSKNGTEPESFHKVLKGLYEKGRKMDWKVPEPEGQTSPKNAAVFSSVLAL

SEQ ID NO: 3876 - protein, 123 aa, Homo sapiens
MHLNGRCICPSDPQFVEEKGIRAEDLVIGALESAFQECDEVIGRELEASGQMGGCTALVAVSLQGKLYMANAGDSRAILVRRDEIRPLSFEFTPETERQRIQQLVGALGSMEAVKLQLLGPGP

SEQ ID NO: 3877 - protein, 117 aa, Homo sapiens
MIVSIFSNKETLFQREMKKKTVCTLNMGDKKYEDMEGEENGDNTISTGLLYSEADRCPICLNCLLEKEVGFPESCNHVFCMTCILKWAETLASCPIDRKPFQAVFKFSALEGYVKVQ

SEQ ID NO: 3878 - protein, 90 aa, Homo sapiens
MQPEERVSCIFRVVSVFPRTEQNEQGYCAHKPEVIFRLEQGEEPWRLEEEFPSQSFPGSSWLWWFPRLSLFWLTLTVWRNPGEKSGQLIT

SEQ ID NO: 3879 - protein, 153 aa, Homo sapiens
MKGSDNQEKLVYQIIEDAGNKGIWSRDIRYKSNLPLTEINKILKNLESKKLIKAVKSVAASKKKVYMLYNLQPDRSVTGGAWYSDQDFESEFVEVLNQQCFKFLQSKAETARESKQNPMIQRNSSFASSHEVWKYICELGISKSYPWKTLKPS

SEQ ID NO: 3880 - protein, 105 aa, Homo sapiens [sequence omitted]

SEQ ID NO: 3881 - protein, 321 aa, Homo sapiens
MPLLDRSPAHSPPRTPTPGASDCHCLWEHQTSIDSDMATLWLTEDEASSTGGREPVGPCRHLPVSTVSDLELLKGLRALGENPHPITPFTRQLYHQQLEEAQIAPGPEFSGHSLELAAALRTGCIPDVQADEDALAQQFEQPDPARRWREGVVKSSFTYLLLDPRETQDLPARAFSLTPAERLQTFIRAIFYVGKGTRARPYVHLWEALGHHGRSRKQPHQACPKVRQILDIWASGCGVVSLHCFQHVVAVEAYTREACIVEALGIQTLTNQKQGHCYGVVAGWPPARRRRLGVHLLHRALLVFLAEGERQLHPQDIQARG

SEQ ID NO: 3882 - protein, 132 aa, Homo sapiens
MCSAGELLRGGDGGERDEDGDALAEREAAGTEWDPGASPRRRGQRPKESEQDVEDSQNHTGEPVGDDYKKMGTLFGELNKNLINMGFTRMYFGERIVEPVIVIFFWVMLWFLGLQALGLVAVLCLVIIYVQQ

SEQ ID NO: 3883 - protein, 366 aa, Homo sapiens
MLPRLLLLICAPLCEPAELFLIASPSHPTEGSPVTLTCKMPFLQSSDAQFQFCFFRDTRALGPGWSSSPKLQIAAMWKEDTGSYWCEAQTMASKVLRSRRSQINVHRVPVADVSLETQPPGGQVMEGDRLVLICSVAMGTGDITFLWYKGAVGLNLQSKTQRSLTAEYEIPSVRESDAEQYYCVAENGYGPSPSGLVSITVRIPVSRPILMLRAPRAQAAVEDVLELHCEALRGSPPILYWFYHEDITLGSRSAPSGGGASFNLSLTEEHSGNYSCEANNGLGAQRSEAVTLNFTGRRSARDPLRSLPSPLPQEFTYLNSPTPGQLQPIYENEPREQSVAVHGRQQHSSEQKAQKPWGHIWRTRFP

SEQ ID NO: 3884 - protein, 555 aa, Homo sapiens [sequence omitted]

SEQ ID NO: 3885 - protein, 213 aa, Homo sapiens [sequence omitted]

SEQ ID NO: 3886 - protein, 275 aa, Homo sapiens
MPWQSVPLEESLPTCQRGDAFPVGEVKMLEKQTNPPDYLTEAELITLMEKHGIGTDASIPVHINNICQRNYVTVESGRRLKPTNLGIVLVHGYYKIDAELVLPTIRSAVEKQLNLIAQGKADYRQVLGHTLDVFKRKFHYFVDSIAGMDELMEVSFSPLAATGKPLSRCGKCHRFMKYIQAKPSRLHCSHCDETYTLPQNGTIKLYKELRCPLDDFELVLWSSGSRGKSYPLCPYCYNHPPFRDMKKGECSHSLLSTGSCSLFSVPTPALHQAGL

SEQ ID NO: 3887 - protein, 362 aa, Homo sapiens
MDVYDIASLVGHEFERVIDQHGCEAIARLMPKVVRVLEILEVLVSRHHVAPELDELRLELDRLRLERMDRIEKERKHQKELELVEDVWRGEAQDLLSQIAQLQEENKQLMTNLSHKDVNFSEEEFQKHEGMSERERQVMKKLKEVVDKQRDEIRAKDRELGLKNEDVEALQQQQTRLMKINHDLRHRVTVVEAQGKALIEQKVELEADLQTKEQEMGSLRAELGKLRERLQGEHSQNGEEEPETEPVGEESISDAEKVAMDLKDPNRPRFTLQELRDVLHERNELKSKVFLLQEELAYYKSEEMEEENRIPQPPPIAHPRTSPQPESGIKRLIFTAIMPMVAAGLIIDDPTLQPVRRLVSLV

SEQ ID NO: 3888 - protein, 108 aa, Homo sapiens [sequence omitted]

SEQ ID NO: 3889 - protein, 925 aa, Homo sapiens
MPGEATETVPATEQELPQPQAETAVLPMSSALSVTAALGQPGPTLPPPCSPAPQQCPLSAANQASPFPSPSTIASTPLEVPFPQSSSGTALPLGTAPEAPTFLPNLIGPPISPAALALASPMIAPTLKGTPSSSAPLALVALAPHSVQKSSAFPPNLLTSPPSVAVAESGSVITLSAPIAPSEPKTNLNKVPSEVVPNPKGTPSPPCIVSTVPYHCVTPMASIQSGVASLPQTTPTTTLAIASPQVKDTTISSVLISPQNPGSLSLKGPVSPPAALSLSTQSLPVVTSSQKTAGPNTPPDFPISLGSHLAPLHQSSFGSVQLLGQTGPSALSDPTEKTISVDHSSTGASYPSQRSVIPPLPSRNEVVPATVAAFPVVAPSVDKGPSTISSITCSPSGSLNVATSSSLSPTTSLILKNSPNATYHYPLVAQMPVSSVGTTPLVVTNPCTIAAAPTTTFEVATCVSPPMSSGPISNIEPTSPAALVMAPVAPKEPSTQVATTLRIPVSPPLPDPEDLKNLSSSVLVKFPTQKDLQTVPASLEGAPFSPAQAGLTTKKDPTVLPLVQAAPKNSPSFQSTSSSPEIPLSPEATLAKKSLGEPLPIVAAFPLESADPAGVAPTTAKAAAFEKVLPKPESASVSAAPTPPVSLPLAPSPVPTLPPKQQFLPSSPGLVLESPSKPLAPADEDELPPLIPPEPISGGVPFQSVLVNMPTPKSAGIPVPTPSAKQPVTKNNKGSGTESDSDESVPELEEQDSTQATTQQAQLAAAAEIDEEPVSKAKQSRSEKKARKAMSKLGLRQVTGVTRVTIRKSKNILFVITKPDVYKSPASDTYIVFGEAKIEDLSQQAQLAAAEKFKVQGEAVSNIQENTQTPTVQEESEEEEVDETGVEVKDIELVMSQANVSRAKAVRALKNNSNDIVNAIMELTM

SEQ ID NO: 3890 - protein, 601 aa, Homo sapiens [sequence omitted]

SEQ ID NO: 3891 - protein, 274 aa, Homo sapiens
MHLCGGNGLLTQTDPKEQQRQLKKQKNRAAAQRSRQKHTDKADALHQQHESLEKDNLALRKEIQSLQAELAWWSRTLHVHERLCPMDCASCSAPGLLGCWDQAEGLLGPGPQGQHGCREQLELFQTPGSCYPAQPLSPGPQPHDSPSLLQCPLPSLSLGPAVVAEPPVQLSPSPLLFASHTGSSLQGSSSKLSALQPSLTAQTAPPQPLELEHPTRGKLGSSPDNPSSALGLARLQSREHKPALSAATWQGLVVDPSPHPLLAFPLLSSAQVHF

SEQ ID NO: 3892 - protein, 732 aa, Homo sapiens
MGFRDEAAGYFHKAVKLNPDFSDAKENFYRVANWLVERWHFIMLNDTKRNTIYNAAIQKAVCLGSKSVLDIGAGTGILSMFAKKAGAHSVYACELSKTMYELACDVVAANKMEAGIKLLHTKSLDIEIPKHIPERVSLVVTETVDAGLFGEGIVESLIHAWEHLLLQPKTKGESANCEKYGKVIPASAVIFGMAVECAEIRRHHRVGIKDIAGIHLPTNVKFQSPAYSSVDTEETIEPYTTEKMSRVPGGYLALTECFEIMTVDFNNLQELKSLATKKPDKIGIPVIKEGILDAIMVWFVLQLDDEHSLSTSPSEETCWEQAVYPVQDLADYWIKPGDHVMMEVSCQDCYLRIQSISVLGLECEMDVAKSFTQNKDLLSLGNEAELCSALANLQTSKPDAVEQTCILESTEIALLNNIPYHEGFKMAMSKVLSSLTPEKLYQTMDTHCQNEMSSGTGQSNTVQNILEPFYVLDVSEGFSVLPVIAGTLGQVKPYSSVEKDQHRIALDLISEANHFPKETLEFWLRHVEDESAMLQRPKSDKLWSIIILDVIEPSGLIQQEIMEKAAISRCLLQSGGKIFPQYVLMFGLLVESQTLLEENAVQGTERTLGLNIAPFINQFQVPIRVFLDLSSLPCIPLSKPVELLRLDLMTPYLNTSNREVKVYVCKSGRLTAIPFWYHMYLDEEIRLDTSSEASHWKQAAVVLDNPIQVEMGEELVLSIQHHKSNVSITVKQ

SEQ ID NO: 3893 - protein, 280 aa, Homo sapiens [sequence omitted]

SEQ ID NO: 3894 - protein, 105 aa, Homo sapiens [sequence omitted]

SEQ ID NO: 3895 - protein, 70 aa, Homo sapiens
MVNVPKTRRTFCKKCGKHQPHKVTQYKKGKDSLYAQGKRRYDRKQSGYGGQTKPIFRKKVSGSYYLTFPS

SEQ ID NO: 3896 - protein, 990 aa, Homo sapiens
MVQSKLDFSQVWYIEIQEKSHSRSELLQQALCNAKIFGEDEVELMNWLNEVHDKLSKLSVQDYSTEGLWKQQSELRVLQEDILLRKQNVDQALLNGLELLKQTTGDEVLIIQDKLEAIKARYKDITKLSTDVAKTLEQALQLARRLHSTHEELCTWLDKVEVELLSYETQVLKGEEASQAQMRPKELKKEAKNNKALLDSLNEVSSALLELVPWRAREGLEKMVAEDNERYRLVSDTITQKVEEIDAAILRSQQFDQAADAELSWITETEKKLMSLGDIRLEQDQTSAQLQVQKTFTMEILRHKDIIDDLVKSGHKIMTACSEEEKQSMKKKLDKVLKNYDTICQINSERYLQLERAQSLVNQFWETYEELWPWLTETQSIISQLPAPALEYETLRQQQEEHRQLRELIAEHKPHIDKMNKTGPQLLELSPGEGFSIQEKYVAADTLYSQIKEDVKKRAVALDEAISQSTQFHDKIDQILESLERIVERLRQPPSISAEVEEIKEQISENKNVSVDMEKLQPLYETLKQRGEEMIARSGGTDKDISAKAVQDKLDQMVFIWENIHTLVEEREAKLLDVMELAEKFWCDHMSLIVTIKDTQDFIRDLEDPGIDPSVVKQQQEAAETIREEIDGLQEELDIVINLGSELIAACGEPDKPIVKKSIDELNSAWDSLNKAWKDRIDKLEEAMQAAVQYQDGLQAVFDWVDIAGGKLASMSPIGTDLETVKQQIEELKQFKSEAYQQQIEMERLNHQAELLLKKVTEESDKHTVQDPLMELKLIWDSLEERIINRQHKLEGALLALGQFQHALDELLAWLTHTEGLLSEQKPVGGDPKAIEIELAKHHVLQNDVLAHQSTVEAVNKAGNDLIESSAGEEASNLQNKLEVLNQRWQNVLEKTEQRKQQLDGALRQAKGFHGEIEDLQQWLTDTERHLLASKPLGGLPETAKEQLNVHMEVCAAFEAKEETYKSLMQKGQQMLARCPKSAETNIDQD

SEQ ID NO: 3897 - protein, 161 aa, Homo sapiens
MGHRPNLGQPPHPNAVAAALHASLCPANRGTCPLGKPGYPGCLWFQPLLLFPGCLCSPDGPFPRAVFTSAGKGPLQTDLGRGRVPPRDQQTPKSGPCPRAPVASNRQSGGSAVSAPLSGARRAWKSAFAAPPRSRLRPQKGVPWTEKRARGGGRAGPCRRT

SEQ ID NO: 3898 - protein, 180 aa, Homo sapiens [sequence omitted]

SEQ ID NO: 3899 - protein, 137 aa, Homo sapiens
MAGGSGFGKQRFFRSGFRTGPLSSNTAPANERLRVYSSLLAWREGKNRSTLLPYSTHIVLAAQPCVLDVPQGQQHLTTGPQCSHPTLHPSSSLAQPSRALDCLQSCNSQIFLLIVLFGLSLCFQPPNSSMVMFSNQI

SEQ ID NO: 3900 - protein, 113 aa, Homo sapiens [sequence omitted]

SEQ ID NO: 3901 - protein, 813 aa, Homo sapiens
MAENVTREDFLVGRPPELGQGDADVAGYLQSARAQLWRELRDQPLTMAYVSSGSYSYMTSSASEFLLSLTLPGAPGAQIVHSQVEEQQLLAAGSSVVSCLLEGPVQLGPGSVLQHCHLQGPIHIGAGCLVTGLDTAHSKALHGRELRDLVLQGHHTRLHGSPGHAFTLVGRLDSWERQGAGTYLNVPWSEFFKRTGVRAWDLWDPETLPAEYCLPSARLFPVLHPSRELGPQDLLWMLDHQEDGGEALRAWRASWRLSWEQLQPCLDRAATLASRRDLFFRQALHKARHVLEARQDLSLRPLIWAAVREGCPGPLLATLDQVAAGAGDPGVAARALACVADVLGCMAEGRGGLRSGPAANPEWMRPFSYLECGDLAAGVEALAQERDKWLSRPALLVRAARHYEGAGQILIRQAVMSAQHFVSTEQVELPGPGQWVVAECPARVDFSGGWSDTPPLAYELGGAVLGLAVRVDGRRPIGARARRIPEPELWLAVGPRQDEMTVKIVCRCLADLRDYCQPHAPGALLKAAFICAGIVHVHSELQLSEQLLRTFGGGFELHTWSELPHGSGLGTSSILAGTALAALQRAAGRVVGTEALIHAVLHLEQVLTTGGGWQDQVGGLMPGIKVGRSRAQLPLKVEVEEVTVPEGFVQKLNDHLLLVYTGKTRLARNLLQDVLRSWYARLPAVVQNAHSLVRQTEECAEGFRQGSLPLLGQCLTSYWEQKKLMAPGCEPLTVRRMMDVLAPHVHGQSLAGAGGGGFLYLLTKEPQQKEALEAVLAKTEGLGNYSIHLVEVDTQGLSLKLLGTEASTCCPFP

SEQ ID NO: 3902 - protein, 150 aa, Homo sapiens [sequence omitted]

SEQ ID NO: 3903 - protein, 104 aa, Homo sapiens
MQKLKMASKRPRALPQKLGSYLHDPGSRPQPPALVGRQEAWSAILWPGWHVCCALPAAHVRICDFCSVICSSRRGPVWEEPPLKSSQPATSLSPACRIPRRPRT

SEQ ID NO: 3904 - protein, 112 aa, Homo sapiens [sequence omitted]

SEQ ID NO: 3905 - protein, 340 aa, Homo sapiens
MVSRMGWGGRRKRLGRWGDLGPGSVPLLPMPLPPPPPPSCRGPGGGRISIFSLSPAPHTRSSPSSFSPPTAGPPCSVLQGTGASQSCHSALPIPATPPTQAQPAMTPASASPSWGSHSTPPLAPATPTPSQQCPQDSPGLRVGPLIPEQDYERLEDCDPEGSQDSPIHGEEQQPLLHVPEGLRGSWHHIQNLDSFFTKIYSYHQRNGFACILLEDVFQLGQFIFIVTFTTFLLRCVDYNVLFANQPSNHTRPGPFHSKVTLSDAILPSAQCAERIRSSPLLVLLLVLAAGFWLVQLLRSVCNLFSYWDIQVFYREALHIPPGKGREDTGMYWRGQPGGLD

SEQ ID NO: 3906 - protein, 310 aa, Homo sapiens
MSSVENGGHWKRVARRGNARASGGGQPGVGSARVSCLSFMLGRRCCVHVRKHLIACQKFPPLCACQAFDQVRTLVLCECAHADRSGGAPSLCPHAAEPRGSPAPQACGSAAKCVRCASWVLLCALSYGDTGGVGLDRYRSDYGDTGGVRLDRYRSDYGGTGGVGLDRYRSDYGGTGGVGLDRYRSDYGGTGGVGLDRYRSDYGGTGGVGLDRYRSDYGGTGGVGLDRYRSDYGGTGGVGLDRYRSDYGGTGGVGLDRYRSDYGDTGGVGLDRYRSDYGGTGCVGLDRYRSDYGGTGGVGLDRYWSDARAP

SEQ ID NO: 3907 - protein, 289 aa, Homo sapiens
MADSCRNLTYVRGSVGPATSTLMFVAGVVGNGLALGILSARRPARPSAFAVLVTGLAATDLLGTSFLSPAVFVAYARNSSLPGLARGGPALCDAFAFAMTFFGLASMLILFAMAVERCLALSHPYLYAQLDGPRCARLALPAIYAFCVLFCALPLLGLGQHQQYCPGSWCFLRMRWAQPGGAAFSLAYAGLVALLVAAIFLCNGSVTLSLCRMYRQQKRHQGSLGPRPRTGEDEVDHLILLALMTVVMAVCSLPLTVSPLRSWEEWGEEEGSSVGCAHVTDGETEAQKR

SEQ ID NO: 3908 - protein, 117 aa, Homo sapiens [sequence omitted]

SEQ ID NO: 3909 - protein, 111 aa, Homo sapiens
MQIPALTSDSGRTLLYLSALVSCQALCLRQPHSRALAFWAPVFSMKNSKSSFFSPAMHQRSTTWAWLSTPNQWDCWTPITSEAGPPPTGSSFWGIPLAGEFTLVTIPKGPL

SEQ ID NO: 3910 - protein, 264 aa, Homo sapiens
MPRSLKRAQLRSLLPRPPAVSHTQPWYRAAHPTTSPTAASRDVHPASGAVPGPWLVEGTAVREGPQLQDAVPQRPTRPSKALWPAQMSAAPAIRLGQMVPGDTRGLWGPQGTLLTWTYRGGQGGRWTRRAEGPREGTFAEQRPHFQSSGAQQESRLAMGPPPLGLGDAAGDGRGQTGQEKGRAEGRQARKSACKCPRKGPNPGPWTRAAAWWGRLEGAKASAKGEQVRDPGGHLWEQGHVSPCARFNQGHSCGSPKVSHTTWVS

SEQ ID NO: 3911 - protein, 248 aa, Homo sapiens [sequence omitted]

SEQ ID NO: 3912 - protein, 110 aa, Homo sapiens
MLKLLFQKTTPRFHCSIWGGCGPSHWRSPDMKSNLYFFQVSRRLPKAYSLENSMARESERERNQIRRGALSQESCRKNRTYPQDVATLGAVNQPFASLQKRTGSLVPCRG

SEQ ID NO: 3913 - protein, 163 aa, Homo sapiens
MKEDESGSVSCKDMHLLLWLQKRIEMHKAEQCEEEEAMTPRPTKARAPLPSAYVPPLSLPPCPRERLKGMLKEIKPRLSRNCREDPQGCLLNLLLQSHSRSPERPLQRRERRYLQRRREKLMLARRGITLQKMEMPKQTRHRKLKVLEMPSEVCAFLITVYFW

SEQ ID NO: 3914 - protein, 387 aa, Homo sapiens
MSTRSSKAASNDKATKSINKNTVTVRGYSQESTKKKLSQRKLVHENPKANEQLNRRSQRLQQLTEVSRRSLRSREIQGQVQAVKQSLPPTKKEQCSSTQSKSNKTSQKHVKRKVLEVKSDSKEDENLVINEVINSPKGKKRKVEHQTACACSSQCMQGSEKCPQKTTRRDETKPVPVTSEVKRSKMATSVAPKKNEMKKSVHTQVNTNTTLPKSPQPSVPEQSDNELEQAGKSKRGSILQLCEEIAGEIESDNVEVKKESSQMESVKEEKPTEIKLEETSVERQILHQKETNQDVQCNRFFPSRKTKPVKCILNGINSSAKKNSNWTKIKLSKFNSVQHNKLDSQVSPKLGLLRTSFSPPALEMHHPVTQSTFLGTKLHDRNITCQQ

SEQ ID NO: 3915 - protein, 104 aa, Homo sapiens
MMSQDLEPISQNRLPPPTHSGCPDHHFKPTSPAAKKIKRVVQKAKSAREGSILGGTVSIPVWRRSSLGLETEPVLKPCRKEEIISEPRAELVEKKWRARSQTSP

SEQ ID NO: 3916 - protein, 166 aa, Homo sapiens [sequence omitted]

SEQ ID NO: 3917 - protein, 115 aa, Homo sapiens [sequence omitted]

SEQ ID NO: 3918 - protein, 316 aa, Homo sapiens
MERDITNCSSPEISAELIGQFSTKKNKQELTQDKGASLEKENNRCNDQCNQFTRIEKQTKHMKKYPKRPDWNINKPPKRYIPASEKYPKQLQKQREEKKVRRQMGLLHLVEKNNPGHLSQNRGISPEIFHSSHQETESKLRWHLVKKEEEPLNIHSFSKERSPSSPVPVVKNRTQQTQNTLHLPLKNSSYERENLISGSNQTELSSGISESSHFIPYVRTNEIYYLDPDAPLSGPSTQDPQYQNSQDCGQKRQLFDSDCVRDPLLNPNMVKNRDRQQAILKGLSELRQGLLQKQKELESSLLPLAENQEESFGSSF

SEQ ID NO: 3919 - protein, 706 aa, Homo sapiens [sequence omitted]

SEQ ID NO: 3920 - protein, 150 aa, Homo sapiens [sequence omitted]

SEQ ID NO: 3921 - protein, 102 aa, Homo sapiens
MKFRNDLELFKPGIWKKLTLLFSGKRQESASKSPGSNHGSTVMPLEHEVLQEDAIGMASIPGPGEQPETRRVAQEGTGSQCYTVACQSQSQDLITGSPINQS

SEQ ID NO: 3922 - protein, 626 aa, Homo sapiens
MDFREILMIASKGQGVNNVPKRYSLAVGPPKKDPKVKGVQSAAVQAFLKRKEEELRRKALEEKRRKEELVKKRIELKHDKKARAMAKRTKDNFHGYNGIPIEEKSKKRQATESHTSQGTDREYEMEEENEFLEYNHAESEQEYEEEQEPPKVESKPKVPLKSAPPPMNFTDLLRLAEKKQFEPVEIKVVKKSEERPMTAEELREREFLERKHRRKKLETDGKLPPTVSKKAPSQKESVGTKLSKGSGDRHPSSKGMPLPHAEKKSRPSMANEKHLALSSSKSMPGERIKAGSGNSSQPSLREGHDKPVFNGAGKPHSSTSSPSVPKTSASRTQKSAVEHKAKKSLSHPSHSRPGPMVTPHNKAKSPGVRQPGSSSSSAPGQPSTGVARPTVSSGPVPRRQNGSSSSGPERSISGSKKPTNDSNPSRRTVSGTCGPGQPASSSGGPGRPISGSVSSARPLGSSRGPGRPVSSPHELRRPVSGLGPPGRSVSGPGRSISGSIPAGRTVSNSVPGRPVSSLGPGQTVSSSGPTIKPKCTVVSETISSKNIISRSSNGQMNGMKPPLSGYRAAQGPQRLPFPTGYKRQREYEEEDDDDDEYDSEMEDFIEDEGEPQEEISKHIREIFGYD

SEQ ID NO: 3923 - protein, 102 aa, Homo sapiens
MYQSWAESQPGDDLEEARMWPHVLVALTFKQAKPTLHCMLGVVLVGQRGLSEHSGCHMKLTLPGQTGLWGKAATVIIWPRSGLSRSRAEGGREGMSKKGPGY

SEQ ID NO: 3924 - protein, 194 aa, Homo sapiens [sequence omitted]

SEQ ID NO: 3925 - protein, 364 aa, Homo sapiens [sequence omitted]

SEQ ID NO: 3926 - protein, 292 aa, Homo sapiens
MMFYWLLSIVGRQRASPGWQNWSSARNSASAAEARSMALPTQAQVVVCGGGITGTSVAHHQSKMGWKDIVLLEQGRLAAGSTRFCAGILSTARHLTIEQKMADYSNKLYHQLEQETGIRTGYTRTGSIFLAQTQDRLISLKRINAGLNVIGIPSEIISPKKVAELHHLLNVHDLVGAMHVPEDAVVSSADVALALASAASQNGVQIYDRTSVLQVMGKKGQVTGVETDKGQIECQYFVNCAGQLLWMLMEEFIFGTGRVASCLGALRRTQNQFSLRARTSWRFRIYRGLGSL

SEQ ID NO: 3927 - protein, 268 aa, Homo sapiens
MHTQVCAHTYIRMHRHLCTHMQIHPQHPICATHRHRYMKTDAHTGLCTHVCMHRHLCTHMQMHPQYPICATHRHTYMETDAHTGLCTHVHMHRHLCTHMQMHPQYPICATHRHTYMETDAHTGLCTHVHMHRHLCTHMQMHPQYPICATHRHTYMETDAHTGLCTHVHMHRHLCTHMQMHPQYPICATHRHTYMETDAHTGLCTHVHMHRHLCTHMQMHPQYRICATHRHTYMETDVHTGLCAHVHMHRHLCTHTYRCTRNIPSVLPY

SEQ ID NO: 3928 - protein, 104 aa, Homo sapiens [sequence omitted]

SEQ ID NO: 3929 - protein, 577 aa, Homo sapiens
MATSASIHSMPTGTIPPPTTIKATGSTHTAPPMTPTTSGTSQSPSSFSTAKTSTSLPYHTSSTHHPEVTPTSTTNITFKHTSTGTRTPVAHTTSASSSRLPTPFTTHSPPTGSSPFSSTGPMTATSFQTTTTYPTPSHPQTTLPTHVPPFSTSLVTPSTHTVIITTHTQMATSASIHSTPTGTVPPPTTLKATGSTHTAPPMTVTTSGTSQTHSSFSTATASSSFISSSSWLPQNSSSRPPSSPITTQLPHLSSATTPVSTTNQLSFSFSPSPSAPSTVSSYVPSSHSSPQTSSPSVGTSSSFVSAPVHSTTLSSGSHSSLSTHPTTASVSASPLFPSSPAASTTIRATLPHTISSPFTLSALLPISTVTVSPTPSSHLASSTIAFPSTPRTTASTHTAPAFSSQSTTSRSTSLTTRVPTSGFVSLTSGVTGIPTSPVTNLTTRHPGPTLSPTTRFLTSSLTAHGSTPASAPVSSLGTPTPTSPGVCSVREQQEEITFKGCMANVTVTRCEGACISAASFNIITQQVDARCSCCRPLHSYEQQLELPCPDPSTPGRRLVLTLQVFSHCVCSSVACGD

SEQ ID NO: 3930 - protein, 317 aa, Homo sapiens
MDGQRLSPCPLWALLTPGPCLHVPGEPGLSLRLSESHTSRSQASGTELFLLPQHHPPFSAEGPAHPAPAPPTGLQRELPRDPCTHQCTGVHTARRQHAGCSVCLLCLLPQDLGPSDTQLLPPGGSKASKGRDNHHLFIYPSIHPSIHPSIHPSIHPSMHPCIHPSNPSIHPSIHPSTHPATHSPICPSIHPSIHPPIHPPIHPPIHPTIHPSIHPPTHPFNHPSIHPPIHPPIHPPIHPSIHPPTQSTIHPSIFPSIYVYLCILRNFLIQLWSLKSARQVAAWRPKESCSWSPRASASRIPSCLGRSVLVFLRPSTD

SEQ ID NO: 3931 - protein, 406 aa, Homo sapiens
MASSAEGDEGTVVALAGVLQSGFQELSLNKLATSLGASEQALRLIISIFLGYPFALFYRHYLFYKETYLIHLFHTFTGLSIAYFNFGNQLYHSLLCIVLQFLILRLMGRTITAVLTTFCFQMAYLLAGYYYTATGNYDIKWTMPHCVLTLKLIGLAVDYFDGGKDQNSLSSEQQKYAIRGVPSLLEVAGFSYFYGAFLVGPQFSMNHYMKLVQGELIDIPGKIPNSIIPALKRLSLGLFYLVGYTLLSPHITEDYLLTEDYDNHPFWFRCMYMLIWGKFVLYKYVTCWLVTEGVCILTGLGFNGFEEKGKAKWDACANMKVWLFETNPRFTGTIASFNINTNAWVARYIFKRLKFLGNNNSLRVSRCYSWPSGTACTQDTWSASRWNSSLLLWKDRLPGSFKRAPP

SEQ ID NO: 3932 - protein, 169 aa, Homo sapiens
MVSGRWAPPRQAWASRRPLQAQVVLKSTSPGPASQQVSKLFWLNSCPAPNRLSRPRTFSSQALRAHLLPPGGLYRPSTGWRTASAGPALAYQGPLQAQLLPPRRPPGDLGLGGRGGARAGPGDSPGGQQRGLHTPFSSWSWDCSVTGRRDVGLRSLVAETSGSTKAGGS

SEQ ID NO: 3933 - protein, 201 aa, Homo sapiens
MAVEALHCGLNPRGIDHPAHAEGIKLQIEGEGVESQSIKNKNFQKVPDQKGTPKRLQAEAETAKSATVKLSKPVALWTQQDVCKWLKKHCPNQYQIYSESFKQHDITGRALLRLTDKKLERMGIAQENLRQHILQQVLQLKVREEVRNLQLLTQGTLLLPDGWMDGEIRRKATLLLGQTGVRENLLLFLHRISIIENSIQI

SEQ ID NO: 3934 - protein, 152 aa, Homo sapiens [sequence omitted]

SEQ ID NO: 3935 - protein, 111 aa, Homo sapiens
MWEFRGKLWGKQCWSTDDAKEPPSVVVTVSLALKALCCSDLKLSVRTSCYFSHKPSFSLTVQIMPCAYPVPPVGTAPPFTSMPRFPLGPHWTLATSCFGLCLILLFESNIF

SEQ ID NO: 3936 - protein, 137 aa, Homo sapiens
MPVIPERGDSCWQPSLALGASSASASALAMLREPFSPPLRCRGPSLGWLRPEPAPSACWEVWRERHGKELELRAALAGQLEFRVGVGLAGPALGAAGRPRRPWAVRGLAPRPVDVEGARGPPAVPAHRGCARFLARP

SEQ ID NO: 3937 - protein, 104 aa, Homo sapiens
MRTVSGKPLPRFSYLPLGPSHNMWELWELQFKMRFGWGHSQNKLSPTRSLPHVGIKGAAIQEEIWVGTQPNQITYQLCAVLLYQFLRKVCKNFQMVMWICSLFL

SEQ ID NO: 3938 - protein, 105 aa, Homo sapiens [sequence omitted]

SEQ ID NO: 3939 - protein, 141 aa, Homo sapiens
MAADGVSSGPAQPPLSSPLGSGSGDSYCSSPGHRQPQQDLHPLSGSPSAVSGAGNHQSHDAQGVFGGSPGHQRSKEREEEEGWIRQPVLGGGTFPSLPSLKPTFLHSANLVTLSPSTFWNHLFTKRPVYCLSPNLPQVNSW

SEQ ID NO: 3940 - protein, 122 aa, Homo sapiens [sequence omitted]

SEQ ID NO: 3941 - protein, 392 aa, Homo sapiens
MCCHLCAHITHVHHMFTHAHSTCANRAHTTTHVCTLTCTQYVHTHSAPHLCAHDIHAHTPMCTHSHGNDTCVSTTQRIFRQWPGGRGWEVAFRQRQPGCCLSSGQDPGTRRSRAGRENGHVPALPLHRPPSHPQLPTLSCRPWSEDQIGAGSLQGPCSQAQGGDQAEGAAAVALGWGQWRGHGTALTTAPVCPSVRSGYLYVTLIYNASVSLALYALFLFYFTTRELLRPFQPVLKFLTIKAVIFLSFWQGLLLAILERCGVIPEVETSGGNKLGAGTLAAGYQNFIICVEMLFASVALRYAFPCQVYAEKKENSPAPPAPMQSISSGIRETVSPQDIVQDAIHNFSPAYQHYTQQATHEAPRPGTHPSGGSGGSRKSRSLEKRMLIPSEDL

SEQ ID NO: 3942 - protein, 390 aa, Homo sapiens
MPAPAQRKLLPRRHLSEKSHHISIPSPDISHKGLRSKRTQPSDPETWESLPRLDSQRHGGPEFSFDLLPEARAIRVTISSGPEVSVRLCHQWALECEELSSPYDVQKIVSGGHTVELPYEFLLPCLCIEASYLQEDTVRRKKCPFQSWPEAYGSDFWKSVHFTDYSQHTQMVMALTLRCPLKLEAALCQRHDWHTLCKDLPNATARESDGWYVLEKVDLHPQLCFKFSFGNSSHVECPHQTGSLTSWNVSMDTQAQQLILHFSSRMHATFSAAWSLPGLGQDTLVPPVYTVSQARGSSPVSLDLIIPFLRPGCCVLASSWSRHKPTWEEFPSQWGLPSPPAPCFTQLPGRRRCLAHRGGGLCALRCGGQMSSLPGSTSCVRMSLTDTWGS

SEQ ID NO: 3943 - protein, 197 aa, Homo sapiens [sequence omitted]

SEQ ID NO: 3944 - protein, 175 aa, Homo sapiens [sequence omitted]

SEQ ID NO: 3945 - protein, 118 aa, Homo sapiens
MFNIPSTHGRCGSWASAVSLSVLFHGPLKKYRSGQAQWLTSVIPALWEAKASGSLEVRSLRPAWPTWRNPISTKNTKISQEWWCAPVVPATLEAEVGELLEPGGGGCNEPRWHRSPPS

SEQ ID NO: 3946 - protein, 551 aa, Homo sapiens [sequence omitted]

SEQ ID NO: 3947 - protein, 104 aa, Homo sapiens
MLSSDLAGKGDQECRAPAEDSPKPKSQRVGAPTTSACMPFPGSPQADSQHPLPKDRAVPDQHPTKSSVRPVFGGAGFQEDSGGGVELMAGGSGPLRKLCHWAWG

SEQ ID NO: 3948 - protein, 188 aa, Homo sapiens [sequence omitted]

SEQ ID NO: 3949 - protein, 212 aa, Homo sapiens
MLPRKPGTAERRRPSRHLPGSPWRPRWACSVSWAASALGVGSSGAPAVRSRGGGKMEPFTNGEWAAEAPGPGLSGALRVVGSRDTRGRAAAVSPNTAGFPRGLREAGRGDLGEAGRFGGRAAASAGPGAGLKVSAAAARPGCGRWANSKVWAAVRRGVGSGKVGSSGLPPEEAVSARLSCRSVKLWQLPSPTFVGRQELSPCPSVSCRRDFS

SEQ ID NO: 3950 - protein, 180 aa, Homo sapiens [sequence omitted]

SEQ ID NO: 3951 - protein, 118 aa, Homo sapiens [sequence omitted]

SEQ ID NO: 3952 - protein, 108 aa, Homo sapiens
MRGRARDLSSRPHLGISRGVSGPGIRVESAAAEQARRRGAAQAQTRGREDGGWVQKENCRPDGRELGEFRTTTVNIGSISTADGSALVKLGNTTVICGVKAVSLNMSY

SEQ ID NO: 3953 - protein, 208 aa, Homo sapiens [sequence omitted]

SEQ ID NO: 3954 - protein, 144 aa, Homo sapiens
MLAHHTLSILGIIMALVLGESGTEVNAVLFGSELTNPLLQMRWFLRETGHYHSFTGDVVDFLFVALFTGVRIGVGACLLFCEMVSPTPKWFVKAGGVAMYAVSWCFMFSIWRFAWRKSIKKYHAWRSRRSEERQLKHNGHLKIH

SEQ ID NO: 3955 - protein, 273 aa, Homo sapiens
MSLRSRTRWGSQEAAAQSLHAGKGSHLSGVGSLVVQGSAGQSLGCAITATAFLLGASTSSKTGLVPAPPAASGQGHEGRALSTWAGGTLPGGTEGAPTWAPAPCPSLLPPRARWGPGFEEPRTRALPAGSWRRASGLGNRGRKNSSRPGTKGASGRTHGWPRARGVTAGRPPGPGPVRGQYGDPACRWQSVLCVWGPQHRLGGGWGRGSRSGQGLGGSGTGRGEQTGSSSGHHPGTAAPTRAAPHPWPRSPGTAGPGVSEGLSRAGTDQWSPG

SEQ ID NO: 3956 - protein, 128 aa, Homo sapiens
MSGRDLPHATVNKGKRQDQNSGSLAASPALLTTGSSCPRMKTIAVRMKAHKMPSESSGYSPSHHLPRQTLRLWPWLCQKLIPCCSPRGPRNCRCARTFLADKCGVAGGLDGVPLCPSAPCVGALMYGV

SEQ ID NO: 3957 - protein, 531 aa, Homo sapiens
MLPITDRLLHLLGLEKTAFRIYAVSTLLLFLLFFLFRLLLRFLRLCRSFYITCRRLRCFPQPPRRNWLLGHLGMYLPNEAGLQDEKKVLDNMHHVLLVWMGPVLPLLVLVHPDYIKPLLGASAATAPKDDLFYGFLKPWLGDGLLLSKGDKWSRHRRLLTPAFHFDILKPYMKIFNQSADIMHAKWRHLAEGSAVSLDMFEHISLMTLDSLQKCVFSYNSNCQEKMSDYISAIIELSALSVRRQYRLHHYLDFIYYRSADGRRFRQACDMVHHFTTEVIQERRRALRRQGAEAWLKAKQGKTLDFIDVLLLARDEDGKELSDEDIRAEADTFMFEGHDTTSSGISWMLFNLAKYPEYQEKCREEIQEVMKGRELEELEWDDLTQLPFTTMCIKESLRQYPPVTLVSRQCTEDIKLPDGRIIPKGIICLVSIYGTHHNPTVWPDSKVYNPYRFDPDNPQQRSPLAYVPFSAGPRNCIGQSFAMAELRVVVALTLLRFRLSVDRTRKVRRKPELILRTENGLWLKVEPLPPRA

SEQ ID NO: 3958 - protein, 405 aa, Homo sapiens
MNPNLEDFHYDYIDLLKEPAKNKQTIFNEERNKGQVQVADLLGINGTGEERLPQDLKVSTDKEGGVQDLLLPEDMLSGEEYECVSPDDISLPPLPGSPESPLAPSDMEVEEPVSSSLSLHISSYGVQAGTSSPGDAQESVLPPPVAFADACNDKRETFSSHFERPYLQFKAEPPLTSRGFVEKSTALHRISAEHPESMMSEVHERALQQHPQAQGGLLETREKMHADNNFTKTQDRLHASSDAFSGLRFQSGTSRGYQRQMVPREEIKSTSAKSSVVSLADQAPNFSRLLSNVTVMEGSPVTLEVEVTGFPEPTLTWYKKGQKLSADGHLQVLHKETRHSVFIPKVCKADAGLYVARAQNSSGALSSNVILHVTGNCRLPITRVNWITLCVVYVSVSLMYWLLTQ

SEQ ID NO: 3959 - protein, 395 aa, Homo sapiens
MWSGLPSRGSTCHTTTLPALVRTPTLMMQPSLDIKPFMSFPVDSSSAVGLFPNFNTMDPVQKAVINHTFGVSIPPKKKQVISCNVCQLRFNSDSQAEAHYKGSKHAKKVKALDATKNKPKMVPSKDSAKANPSCSITPITGNNSDKSEDKGKLKASSSSQPSSSESGSFLLKSGTTPLPPGAATSPSKSTNGAPGTVVESEEEKAKKLLYCSLCKVAVNSLSQLEAHNTGSKHKTMVEARNGAGPIKSYPRPGSRLKMQNGSKGSGLQNKTFHCEICDVHVNSEIQLKQHISSRRHKDRVAGKPLKPKYSPYNKLQRSPSILAAKLAFQKDMMKPLAPSFLSSPLAAAAAVSSALSLPPRPSASLFQAPAIPPALLRPGHGPIRATPASILFAPY

SEQ ID NO: 3960 - protein, 261 aa, Homo sapiens
MDKYIHKRWALVWLACLLFAAALSLILLLKKDHAKGWLRLLKQDVRSGAAARGRAALLLYSADDSGFERLVGALASALCQLPLRVAVDLWSRRELSAQGPVAWFHAQRRQTLQEGGVVVLLFSPGAVALCSEWLQDGVSGPGAHGPHDAFRASLSCVLPDFLQGRAPGSYVGACFDRLLHPDAVPALFRTVPVFTLPSQLPDFLGALQQPRAPRSGRLQERAEQVSRALQPALDSYFHPPGTPAPGRGVGPGAGPGAGDGT

SEQ ID NO: 3961 - protein, 351 aa, Homo sapiens [sequence omitted]

SEQ ID NO: 3962 - protein, 164 aa, Homo sapiens
MMKEFSSTAQGNTEVIHTGTLQRHESHHIRDFCFQEIEKDIHNFEFQWQEEERNGHEAPMTEIKELTGSTDRHDQRHAGNKPIKDQLGSSFHSHLPELHIFQPEWKIGNQVEKSIINASLILTSQRISCSPKTRISNNYGNNSLHSSLPIQKLGSTHERKIFPM

SEQ ID NO: 3963 - protein, 271 aa, Homo sapiens
MTEPQVGCVACPRVHKEPAQVGTPWPAKPRSHPRKRDPTALLPRSLWPACQESVTALCFLQETVERLGQSPAQDTPVLGPCWDPMALGTQGRLLLDRDSKDTQTRISQKGRRLQPPGTPSAPPQRRPRKQLNPCRGTERVDPGFEGVTLKFQIKPDSSLQIIPTYSLPCSSRSQESPADAVGGPAAHPGGTEAHSAGSEALEPRRCASCRTQRTPLWRDAEDGTPLCNACGIRYKKYGTRCSSCWLVPRKNVQPKRLCGRCGVSLDPIQEG

SEQ ID NO: 3964 - protein, 599 aa, Homo sapiens
MAAALRAPTQQVFVAFEDVAIYFSQEEWELLDEMQRLLYRDVMLENFAVMASLGCWCGAVDEGTPSAESVSVEELSQGRTPKADTSTDKSHPCEICTPVLRDILQMIELQASPCGQKLYLGGASRDFWMSSNLHQLQKLDNGEKLFKVDGDQASFMMNCRFHVSGKPFTFGEVGRDFSATSGLLQHQVTPTIERPHSRIRHLRAPTGRKPLKYTESRKSFREKSVFIQHQRADSGERPYKCSECGKSFSQSSGFLRHRKAHGRTRTHECSECGKSFSRKTHLTQHQRVHTGERPYDRSECGKSFRQVSVLIQHQRVHTGERPYECSECGKSFSHSTNLYRHRSAHTSTRPYECSECGKSFSHSTNLFRHWRVHTGVRPYECSECGKAFSCNIYLIHHQRFHTGERPYVCSECGKSFGQKSVLIQHQRVHTGERPYECSECGKVFSQSSGLFRHRRAHTKTKPYECSECEKSFSCKTDLIRHQTVHTGERPYECSVCGKSFIRKTHLIRHQTVHTNERPYECDECGKSYSQSSALLQHRRVHTGERPYECRECGKSFTRKNHLIQHKTVHTGERPYECSECGKSFSQSSGLLRHRRVHVQ

SEQ ID NO: 3965 - protein, 303 aa, Homo sapiens
MGSAGRLHYLAMTAENPTPGDLAPAPLITCKLCLCEQSLDKMTTLQECQCIFCTACLKQYMQLAIREGCGSPITCPDMVCLNHGTLQEAEIACLVPVDQFQLYQRLKFEREVHLDPYRTWCPVADCQTVCPVASSDPGQPVLVECPSCHLKFCSCCKDAWHAEVSCRDSQPIVLPTEHRALFGTDAEAPIKQCPVCRVYIERNEGCAQMMCKNCKHTFCWYCLQNLDNDIFLRHYDKGPCRNKLGHSRASVMWNRTQVVGILVGLGIIALVTSPLLLLASPCIICCVCKSCRGKKKKHDPSTT

SEQ ID NO: 3966 - protein, 639 aa, Homo sapiens
MSASGVLSFTQQGWEQVLAKVKRAVVYLDAACAESLHWGCGSTRLLEAVGGPDCHLREFEPDAIGGGAKQPKAVFVLSCLLKGRTVEILRDIICRSHFQYCVVVTTVSHAVHLTANHVPAAAAAEMEGQQPVFEQLEEKLCEWMGNMNYTAEVFHVPLLLAPVAPHFALTPAFASLFPLLPQDVHLLNSARPDKRKLGSLGDVDSTTLTPELLLQIRCLVSGLSSLCEHLGVREECFAVGSLSQVIAADLANYAPAKNRKKTAAGRASVVFVDRTLDLTGAVGHHGDNLVEKIISALPQLPGHTNDVMVNMIALTALHTEEENYNVVAPGCLSQSSDTTAKALWEALLNTKHKEAVMEVRRHLVEAASRENLPIKMSMGRVTPGQLMSYIQLFKNNLKALMNHCGLLQLGLATAQTLKHPQTAKWDNFLAFERLLLQSIGESAMSVVLNQLLPMIKPVTQRTNEDYSPEELLILLIYIYSVTGELTVDKDLCEAEEKVKKALAQVFCEESGLSPLLQKITDWDSSINLTFHKSKIAVDELFTSLRDIAGARSLLKQFKSVYVPGNHTHQVSRPHPSDYPLLILFVVGGVTVSEVKMVKDLVASLKPGTQVIVLSTRLLKPLNIPELLFATDRLHPDLGF

SEQ ID NO: 3967 - protein, 101 aa, Homo sapiens
MERPDKAALNALQPPEFRNESSLASTLKTLLFFTALMITVPIGLYFTTKSYIFEGALGMSNRDSYFYAAIVAVVAVHVVLALFVYVAWNEGSRQWREGKQD

SEQ ID NO: 3968 - protein, 666 aa, Homo sapiens [sequence omitted]

SEQ ID NO: 3969 - protein, 246 aa, Homo sapiens [sequence omitted]

SEQ ID NO: 3970 - protein, 591 aa, Homo sapiens
MNRFNGLCKVCSERRYRQITIPRGKDGFGFTICCDSPVRVQAVDSGGPAERAGLQQLDTVLQLNERPVEHWKCVELAHEIRSCPSEIILLVWRMVPQVKPGPDGGVLRRASCKSTHDLQSPPNKREKNCTHGVQARPEQRHSCHLVCDSSDGLLLGGWERYTEVAKRGGQHTLPALSRATAPTDPNYIILAPLNPGSQLLRPVYQEDTIPEESGSPSKGKSYTGLGKKSRLMKTVQTMKGHGNYQNCPVVRPHATHSSYGTYVTLAPKVLVFPVFVQPLDLCNPARTLLLSEELLLYEGRNKAAEVTLFAYSDLLLFTKEDEPGRCDVLRNPLYLQSVKLQEGSSEDLKFCVLYLAEKAECLFTLEAHSQEQKKRVCWCLSENIAKQQQLAASPPDSKMSGADTVGDDDEASRKRKSKNLAKDMKNKLGIFRRRNESPGAPPAGKADKMMKSFKPTSEEALKWGESLEKLLVHKYGLAVFQAFLRTEFSEENLEFWLACEDFKKVKSQSKMASKAKKIFAEYIAIQACKEVNLDSYTREHTKDNLQSVTRGCFDLAQKRIFGLMEKDSYPRFLRSDLYLDLINQKKMSPPL

SEQ ID NO: 3971 - protein, 609 aa, Homo sapiens
MGSAQFQGLITQARLPFGATSTTAPSLRNSKGRFGVRALAPERTPSAPRKVSARLPGRTLARTWGRGPAPGASGPAGEGPSRVTAGGGGKLRAPGAARPASGLPDRLWPAPSPSPGAHRAAAGAEQPPSRPSAGPARSGRMNDFGIKNMDQVAPVANSYRGTLKRQPAFDTFDGSLFAVFPSLNEEQTLQEVPTGLDSISHDSANCELPLLTPCSKAVMSQALKATFSGFKKEQRRLGIPKNPWLWSEQQVCQWLLWATNEFSLVNVNLQRFGMNGQMLCNLGKERFLELAPDFVGDILWEHLEQMIKENQEKTEDQYEENSHLTSVPHWINSNTLGFGTEQAPYGMQTQNYPKGGLLDSMCPASTPSVLSSEQEFQMFPKSRLSSVSVTYCSVSQDFPGSNLNLLTNNSGTPKDHDSPENGADSFESSDSLLQSWNSQSSLLDVQRVPSFESFEDDCSQSLCLNKPTMSFKDYIQERSDPVEQGKPVIPAAVLAGFTGSGPIQLWQFLLELLSDKSCQSFISWTGDGWEFKLADPDEVARRWGKRKNKPKLNYEKLSRGLRYYYDKNIIHKTSGKRYVYRFVCDLQNLLGFTPEELHAILGVQPDTED

SEQ ID NO: 3972 - protein, 305 aa, Homo sapiens [sequence omitted]

SEQ ID NO: 3973 - protein, 158 aa, Homo sapiens
MPLHKYPVWLWKRLQLREGICSRLPGHYLRSLEEERTPTPVHYRPHGAKFKINPKNGQRERVEDVPIPIYFPPESQRGLWGGEGWILGQIYANNDKVGPQAAFRGSSQGLAVPALCRTPGVPGETWVGPGDYSLEATHLRQRSTLSEEPQFWQTGLIK

SEQ ID NO: 3974 - protein, 283 aa, Homo sapiens
MPRRSLHAAAVLLLVILKEQPSSPAPVNGSKWTYFVKLNLPSDMHIQGLQSRYSATQLHLHWGNPNDPHGSEHTVSGQHFAAELHIVHYNSDLYPDASTASNKSEGLAVLAVLIEMGSFNPSYDKIFSHLQHVKYKGQEAFVPGFNIEELLPERTAEYYRYRGSLTTPPCNPTVLWTVFRNPVQISQEQLLALETALYCTHMDDPSPREMINNFRQVQKFDERLVYTSFSQGIILSLALAGILGICIVVVVSIWLFRRKSIKKGDNKGVIYKPATKMETEAHA

SEQ ID NO: 3975 - protein, 772 aa, Homo sapiens [sequence omitted]

SEQ ID NO: 3976 - protein, 138 aa, Homo sapiens [sequence omitted]

SEQ ID NO: 3977 - protein, 183 aa, Homo sapiens
MEVKFITGKHGGRRPQRAEPQRICRALWLTPWPSLILKLLSWIILSNLFLHLRATHHMTELPLRFLYIALSEMTFREQTSHQIIQQMSLSNKLEQNQLYGEVINKETDNPVISSGLTLLFAQKPQSPGWKNMSSTKRVCTILADSCRAQAHAADRGERGHFGVQILHHFIEVFNVMAVRSNPF

SEQ ID NO: 3978 - protein, 239 aa, Homo sapiens [sequence omitted]

SEQ ID NO: 3979 - protein, 363 aa, Homo sapiens
MIQVRQEEPCCFSPFCVCESCTKPVPLCHDGEFLTVDLNSTHFCCPQYYCVCEPNLCPMPLLNCAEDMNLVKENVSGQCCPTWHCECNCENLVMPTCEVGEFTAIDHNFQSDCGCIQYLCEKDDVCVFQEVSVLNPGQSMIKYLEEDFCYTIECLEEKDNHTGFHTLNFTLVNCSKKCDVHQVYTPSPSDYGCCGTCKNVSCKFHMENGTSVVYAVGSTWHYNCTTYECVKTDEGAIILNYTMVCPPFNETECKMNEGIVKLYNEGCCKICKREERICQKVIIESVIRKQDCMSQSPINVASCDGKCPSATIYNINIESHLRFCKCCRENGVRNLSVPLYCSGNGTEIMYTLQEPIDCTCQWN

SEQ ID NO: 3980 - protein, 115 aa, Homo sapiens [sequence omitted]

SEQ ID NO: 3981 - protein, 752 aa, Homo sapiens
MQHSCIPTPPSPFSAPPAFLPVVTRESRRGLSSGGSAGRNAGVTATAAAADGWKGRLPSPLVLLPRSARCQARRRRGGRTSSLLLLPPTPERALFASPSPDPSPRGLGASSGAAEGAGAGLLLGCRASMSDNQSWNSSGSEEDPETESGPPVERCGVLSKWTNYIHGWQDRWVVLKNNALSYYKSEDETEYGCRGSICLSKAVITPHDFDECRFDISVNDSVWYLRAQDPDHRQQWIDAIEQHKTESGYGSESSLRRHGSMVSLVSGASGYSATSTSSFKKGHSLREKLAEMETFRDILCRQVDTLQKYFDACADAVSKDELQRDKVVEDDEDDFPTTRSDGDFLHSTNGNKEKLFPHVTPKGINGIDFKGEAITFKATTAGILATLSHCIELMVKREDSWQKRLDKETEKKRRTEEAYKNAMTELKKKSHFGGPDYEEGPNSLINEEEFFDAVEAALDRQDKIEEQSQSEKVRLHWPTSLPSGDAFSSVGTHRFVQKPYSRSSSMSSIDLVSASDDVHRFSSQVEEMVQNHMTYSLQDVGGDANWQLVVEEGEMKVYRREVEENGIVLDPLKATHAVKGVTGHEVCNYFWNVDVRNDWETTIENFHVVETLADNAIIIYQTHKRVWPASQRDVLYLSVIRKIPALTENDPETWIVCNFSVDHDSAPLNNRCVRAKINVAMICQTLVSPPEGNQEISRDNILCKITYVANVNPGGWAPASVLRAVAKREYPKFLKRFTSYVQEKTAGKPILF

SEQ ID NO: 3982 - protein, 327 aa, Homo sapiens
MNDVLLYTYPQKDGKYRLKNTLAVANMKVSRPVMEKVPYALKIETSESCLMLSASSCAERDEWYGCLSRALPEDYKAQALAAFHHSVEIRERLGVSLGERPPTLVPVTHVMMCMNCGCDFSLTLRRHHCHACGKIVCRNCSRNKYPLKYLKDRMAKVCDGCFGELKKRGRAVPGLMRERPVSMSFPLSSPRFSGSAFSSVFQSINPSTFKKQKKVPSALTEVAASGEGSAISGYLSRCKRGKRHWKKLWFVIKGKVLYTYMASEDKVALESMPLLGFTIAPEKEEGSSEVGPIFHLYHKKTLFYSFKAEDTNSAQRWIEAMEDASVL

SEQ ID NO: 3983 - protein, 135 aa, Homo sapiens
MGKVVGAVITEPNLCLSNCLSKQELNGLEPTGLESPAEESGGWDATTAASPPGPRPHGERGDTEAAHGARGDAAEPGSPKRPRHSPLPRPAPGPRPWDAEPPPAFQTQTPPRPCSSLPRLAARGTFQLRNTFFNI

SEQ ID NO: 3984 - protein, 527 aa, Homo sapiens [sequence omitted]

SEQ ID NO: 3985 - protein, 111 aa, Homo sapiens [sequence omitted]

SEQ ID NO: 3986 - protein, 663 aa, Homo sapiens
MSQQDAVAALSERLLVAAYKGQTENVVQLINKGARVAVTKHGRTPLHLAANKGHLPVVQILLKAGCDLDVQDDGDQTALHRATVVGNTEIIAALIHEGCALDRQDKAGNTALHLACQNSHSQSTRVLLLAGSRADLKNNAGDTCLHVAARYNHLSIIRLLLTAFCSVHEKNQAGDTALHVAAALNHKKVAKILLEAGADTTIVNNVLRFSRGRSLRKKRERLKEERRAQSVPRDEVAQSKGSVSAGDTPSSEQAVARKEEAREEFLSASPEPRAKDDRRRKSRPKVSAFSDPTPPADQQPGHQKNLHAHNHPKKRNRHRCSSPPPPHEFRAYQLYTLYRGKDGKVMQAPINGCRCEPLINKLENQLEATVEEIKAELGSVQDKMNTKLGQMENKTQHQMRVLDKLMVERLSAERTECLNRLQQHSDTEKHEGEKRQISLVDELKTWCMLKIQNLEQKLSGDSRACRAKSTPSTCVDQLVVTAGPAAASDSSPPVVRPKEKALNSTATQRLQQELSSSDCTGSRLRNVKVQTALLPMNEAARSDQQAGPCVNRGTQTKKSGKSGPTRHRAQQPAASSTCGQPPPATGSEQTGPHIRDTSQALELTQYFFEAVSTQMEKWYERKIEEARSQANQKAQQDKATLKEHIKSLEEELAKLRTRVQKEN

SEQ ID NO: 3987 - protein, 401 aa, Homo sapiens
MSSLASWWPSYGRTQMNSRASVAGPSWLFCSAPFPHCLSYRSHCSSSCLTRPPGAWQRCASQELARSSQEHLQRTVKYGGRRRMPPPGEMKAFLKGQAIRLLLIHLPGGVDYRTNIQTFTVAAEVQEELCRQMGITEPQEVQEFALFLIKEKSQLVRPLQPAEYLNSVVVDQDVSLHSRRLHWETPLHFDNSTYISTHYSQVLWGYLQGKLPVSAKADAQLARLAALQHLSKANRNTPSGQDLLAYVPKQLQRQVNTASIKNLMGQELRRLEGHSPQEAQISFIEAMSQLPLFGYTVYGVLRVSMQALSGPTLLGLNRQHLILMDPSSQSLYCRIALKSLQRLHLLSPLEEKGPPGLEVNYGSADNPQTIWFELPQAQELLYTTVFLIDSSASCTEWPSIN

SEQ ID NO: 3988 - protein, 105 aa, Homo sapiens [sequence omitted]

SEQ ID NO: 3989 - protein, 374 aa, Homo sapiens
MGCSSSALNKAGDSSRFPSVTSNEHFSTAEESESCFAQPKPHALGRESTVDGNVQRESRPPLQKLKVSAEPTANGVKPLQEQPLAKDVAPGRDATDQSGSTEKTQPGEGLEESGPPQPGGKEDAPAAEGKKKDAGAGTEAESLKGNAEAQPLGPEAKGQPLQAAVEKDSLRAVEVTENPQTAAEMKPLGTTENVLTLQIAGELQPQGTVGKDEQAPLLETISKENESPEILEGSQFVETAEEQQLQATLGKEEQPQLLERIPKENVTPEVLDRSQLVEKPVMNDPFHKTPEGPGNMEQIQPEGIVGSMEHPARNVEAGAYVEMIRSIHTNEEDQRIEGETGEKVETDMENEKVSEGAETKEEETGEVVDLSAAT

SEQ ID NO: 3990 - protein, 483 aa, Homo sapiens [sequence omitted]

SEQ ID NO: 3991 - protein, 319 aa, Homo sapiens [sequence omitted]

SEQ ID NO: 3992 - protein, 274 aa, Homo sapiens
MDRPGFVAALVAGGVAGVSVDLILFPLDTIKTRLQSPQGFNKAGGFHGIYAGVPSAAIGSFPNAAAFFITYEYVKWFLHADSSSYLTPMKHMLAASAGEVVACLIRVPSEVVKQRAQVSASTRTFQIFSNILYEEGIQGLYRGYKSTVLREIPFSLVQFPLWESLKALWSWRQDHVVDSWQSAVCGAFAGGFAAAVTTPLDVAKTRIMLAKAGSSTADGNVLSVLHGVWRSQGLAGLFAGVFPRMAAISLGGFIFLGAYDRTHSLLLEVGRKSP

SEQ ID NO: 3993 - protein, 317 aa, Homo sapiens
MSCLDVMYQVYGPPQPYFAAAYTPYHQKLAYYSKMQEAQECNASPSSSGSGSSSFSSQTPASIKEEEGSPEKERPPEAEYINSRCVLFTYFQGDISSVVDEHFSRALSQPSSYSPSCTSSKAPRSSGPWRDCSFPMSQRSFPASFWNSAYQAPVPPPLGSPLATAHSELPFAAADPYSPAALHGHLHQGATEPWHHAHPHHAHPHHPYALGGALGAQAAPYPRPAAVHEVYAPHFDPRYGPLLMPAASGRPARLATAPAPAPGSPPCELSGKGEPAGAAWAGPGGPFASPSGDVAQGLGLSVDSARRYSLCGASLLS

SEQ ID NO: 3994 - protein, 376 aa, Homo sapiens
MDEGTGLQPGAGEQLEALATAEAVQERCEPETLRSKSLPVLSSASCRPSLSPTSGDANPAFGCVDSSGHQELKQGPNPLAPSPSAPSTSAGLGDCNHRVDLSKTFSVSSALAMLQERRCLYVVLTDSRCFLVCMCFLTFIQALMVSGYLSSVITTIERRYSLKSSESGLLVSCFDIGNLVVVVFVSYFGGRGRRPLWLAVGGLLIAFGAALFALPHFISPPYQIQELNASAPNDGLCQGGNSTATLEPPACPKDSGGNNHWVYVALFICAQILIGMGSTPIYTLGPTYLDDNVKKENSSLYLAIMYVMGALGPAVGYLLGGLLIGFYVDPRNPVHLDQNDPRFIGNWWSGFLLCAIAMFLVIFPMFTFPKKLPPRH

SEQ ID NO: 3995 - protein, 130 aa, Homo sapiens [sequence omitted]

SEQ ID NO: 3996 - protein, 239 aa, Homo sapiens
MGVPPYQALDFDVLKKCSRGWKTHFDSVLTVEHSLVGFQTPRFSGTVRGAEMSITVVQSARSQTGPHTGGFVKSFVLWLWTVSWNGFWSQSTSTSPLEPGTIQLSAHRGLYHDFWEEQVETGQTHHPDLVAAFHPGFHSSPDLMEAWLPTLLLLRDYKIPTLITVYSHQELVSSLQILVELDTHITAFGSNPFMSLKPEQVYSSPNKQPVYCSAYYIMFLGSSCQLDNRQLEEKVDGGI

SEQ ID NO: 3997 - protein, 395 aa, Homo sapiens
MGQLQSELQYRRGATSSQAQFHLPMDMVHLVHAKNAQALASDHDYRTQYHKFTALPEDLKMAWAKKAHALQSELRYKSDLIGMKGIGWLALRSPQMESAKKAGELISETKYRKKPDSIKFTTVVDSPDLVHAKNSYMHCNERMYRSGDAESLHRYTLIPDHPDFTRARLNALHLSDKVYRNSWEQTRAGSYDFRLDAIPFQTARASREIASDFRYKEAFLRDRGLQIGYRSVDDDPRMKHFLNVGRLQSDNEYKKDFAKSRSQFHSSTDQPGLLQAKRSQQLASDVHYRQPLPQPTCDPEQLGLRHAQKAHQLQSDVKYKSDLNLTRGVGWTPPGSYKVEMARRAAELANARGLGLQGAYQRGAEAVEAGDHQSGEVNPDATEILHVKKKKALLL

SEQ ID NO: 3998 - protein, 114 aa, Homo sapiens
MPSRTARYARYSPRQRRRRMLADRSVRFPNDVLFLDHIRQGDLEQVGRFIRTRKVSLATIHPSGLAALHEAVLSGNLECVKLLVKYGADIHQRDEAGWTPLHIACSDGYPDIAR

SEQ ID NO: 3999 - protein, 299 aa, Homo sapiens
MLKEVLQREGKSYKSETLMYIKKARASENKLSESILAHRENMRQMIRSFSEPFGRDLLSISDGRGRAHNRRGHNDGEDSLTATSCSLVPFGDFGGMHTDVSSFQTMDQMVSNMRNYMQKLERNFGQLSVDPNGHSFCSSSVMTYSKIGDEPPKVFQASTQTRRAPGGIKETRKAMRDSDSGLEKMAIGHHIHDRAHVIKKSKNKKTGDEEVNQEFINMNESDAHAFDEEWQSEVLKYKPGRHNLGNTRMRSVGHENPGSRELKRREKPQQSPAIEHGRRSNVLGDKLHIKGSSVKSNKK

SEQ ID NO: 4000 - protein, 311 aa, Homo sapiens [sequence omitted]

SEQ ID NO: 4001 - protein, 567 aa, Homo sapiens [sequence omitted]

SEQ ID NO: 4002 - protein, 335 aa, Homo sapiens
MTENVVCTGAVNAVKEVWEKRIKKLNEDLKREKEFQHKLVRIWEERVSLTKLREKVTREDGRVILKIEKEEWKTLPSSLLKLNQLQEWQLHRTGLLKIPEFIGRFQNLIVLDLSRNTISEIPPGIGLLTRLQELILSYNKIKTVPKELSNCASLEKLELAVNRDICDLPQELSNLLKLTHLDLSMNDFTTIPLAVLNMPALEWLDMGSNKLEQLPDTIERMQNLHTLWLQRNEITCLPQTISNMKNLGTLVLSNNKLQDIPVCMEEMANLRFVNFRDNPLKLKVSLPPSEGTDEEEERELFGLQFMHTYIQESRRRADHQVNGSTTLPISINTDG

SEQ ID NO: 4003 - protein, 131 aa, Homo sapiens
MTHSSQDTGSCGIQEDGKLYVVDSINDLNKLNLCPAGSQHLFPLEDKIPVLGTNSGNGSRSLFFVGLLIVLIVSLALVFFVIFLIVQTGNKMDDVSRRLTAEGKDIDDLKRINNMIVKRLNQLNQLDSEQN

SEQ ID NO: 4004 - protein, 208 aa, Homo sapiens
MDLLKISHTKLHLLEDLSIKNKQRMSNLAQFDSDFYQSNFTIDNQEQSGDDSNTYGNLYGSRKQQAGEQPQPASFVPSEMLMSSGYAGQFFQPASNSDYYSQSPYIDSFDEEPPLLEELGIHFDHIWQKTLTVLNPMEPVDGSIMNETDLTGPILFCVALGATLLLVMCHRKHQILMLVLSSAGFEAICINIRETVSPYIVNFLSERE

SEQ ID NO: 4005 - protein, 318 aa, Homo sapiens [sequence omitted]

SEQ ID NO: 4006 - protein, 104 aa, Homo sapiens
MPTLILQGKSAADHTPPFLVLPKMPRTSKVCSFEETEADLTPLPFSPDVTLRMHTSICLKIMEFWRWKGPQRFSGSLCSGCKCSYHTPLPTMGSLSTTEESWGY

SEQ ID NO: 4007 - protein, 127 aa, Homo sapiens
MTSDGRNKTGPGTLARKNPTKTRARTHSRTGEVDFREGYLEEESLKVQHRRKTVSQYRNFIFYFIIIFLRPESRSVAQAGVQWRDLGSLQTPPPGFTPFGCLTLHSSWDYKRPPPRPANLQYGNFNS

SEQ ID NO: 4008 - protein, 342 aa, Homo sapiens [sequence omitted]

SEQ ID NO: 4009 - protein, 301 aa, Homo sapiens
MADDEDYEEVVEYYTEEVVYEEVPGETITKIYETTTTRTSDYEQSETSKPALAQPALAQPASAKPVERRKVIRKKVDPSKFMTPYIAHSQKMQDLFSPNKYKEKFEKTKGQPYASTTDTPELRRIKKVQDQLSEVKYRMDGDVAKTICHVDEKAKDIEHAKKVSQQVSKVLYKQNWEDTKDKYLLPPDAPELVQAVKNTAMFSKKLYTEDWEADKSLFYPYNDSPELRRVAQAQKALSDVAYKKGLAEQQAQFTPLADPPDIEFAKKVTNQVSKQKYKEDYEKKSKANGVRHLALKLQMPE

SEQ ID NO: 4010 - protein, 200 aa, Homo sapiens
MQECIDQKVYQAEVDNLPVAFEDGSINGGDRPGGSSLSIQTANPGNHVEIQAAYIGTTIIIRQTAGQLSFSIKVAEDVAMAFSAEQDLQLCVGGCPPSQRLSRSERNRRGAITIDTARRLCKEGLPVEDAYFHSCVFDVLISGDPNFTVAAQAALEDARAFLPDLEKLHLFPSDAGVPLSSATLLAPLLSGLFVLWLCIQ

SEQ ID NO: 4011 - protein, 478 aa, Homo sapiens
MPLQKTNEEVSLSGIDSECTVVQPSPGSQSNARILGVCSDNQLSTTSPETVAAKRLHHVLAASEDKDKMKKEVLQSSRDIMQSKSACEIKQSHQECSTQQTQQKKYLEQLHLPQSKPISPNFKVKTIKLPTLDHTLNETDHSYESHKQQSEIDVQTFTKKQYLKTKKTEASTECSHKQSLAERHYQLPKKEKRVTVQLPTESIQKNQEDKLKMVPRKQREFSGSDRGKLPGSEEKNQGPSMIGRKEERLITERKHEHLKNKSAPKVVKQKVIDAHLDSQTQNFQQTQIQTAESKAEHKKLPQPYNSLQEEKCLEVKGIQEKQVFSNTKDSKQEITQNKSFFSSVKESQRDDGKGALNIVEFLRKREELQQILSRVKQFEAEPNKSGLKTFQTLLNTIPGWLISEDKREYAVHIAMENNLEKVKEEITHIKTQAEDMLVSYENVIQTAMMSSKTGKPGNKPTSLDETSSKVSNVHVSNN

SEQ ID NO: 4012 - protein, 226 aa, Homo sapiens [sequence omitted]

SEQ ID NO: 4013 - protein, 599 aa, Homo sapiens
MMLPYPSALGDQYWEEILLPKNGENVETMKKLTQNHKAKGLPSNDTDCPQKKEGKAQIVVPVTFRDVTVIFTEAEWKRLSPEQRNLYKEVMLENYRNLLSLAEPKPEIYTCSSCLLAFSCQQFLSQHVLQIFLGLCAENHFHPGNSSPGHWKQQGQQYSHVSCWFENAEGQERGGGSKPWSARTEERETSRAFPSPLQRQSASPRKGNMVVETEPSSAQRPNPVQLDKGLKELETLRFGAINCREYEPDHNLESNFITNPRTLLGKKPYICSDCGRSFKDRSTLIRHHRIHSMEKPYVCSECGRGFSQKSNLSRHQRTHSEEKPYLCRECGQSFRSKSILNRHQWTHSEEKPYVCSECGRGFSEKSSFIRHQRTHSGEKPYVCLECGRSFCDKSTLRKHQRIHSGEKPYVCRECGRGSSQNSDLIKHQRTHLDEKPYVCRECGRGFCDKSTLIIHERTHSGEKPYVCGECGRGFSRKSLLLVHQRTHSGEKHYVCRECRRGFSQKSNLIRHQRTHSNEKPYICRECGRGFCDKSTLIVHERTHSGEKPYVCSECGRGFSRKSLLLVHQRTHSGEKHYVCRECGRGFSHKSNLIRHQRTH

SEQ ID NO: 4014 - protein, 246 aa, Homo sapiens [sequence omitted]

SEQ ID NO: 4015 - protein, 129 aa, Homo sapiens
MHLCFCLSSLSVTAGAPGSPSRRDVSTLRRHCSLHQQLASAVAAQSFAEHPATWPSVNPEKPRDSGRGDWGLGPGNPKDVPAARKGVTGATRGRGRRESGPRKPRVGARGRRRPRALLRPLPETPPRRP

SEQ ID NO: 4016 - protein, 147 aa, Homo sapiens
MAGWWPALSRAARRHPWPTNVLLYGSLVSAGDALQQRLQGREANWRQTRRVATLVVTFHANFNYVWLRLLERALPGRAPHALLAKLLCDQVVGAPIAVSAFYVEWIDVLALCTADQLQPCSCSMENSLRWSLWFSLGHLHLFFPAEW

SEQ ID NO: 4017 - protein, 144 aa, Homo sapiens [sequence omitted]

SEQ ID NO: 4018 - protein, 160 aa, Homo sapiens [sequence omitted]

SEQ ID NO: 4019 - protein, 122 aa, Homo sapiens [sequence omitted]

SEQ ID NO: 4020 - protein, 225 aa, Homo sapiens
MEEGERSPLLSQETAGQKPLSVHRPPTSGCLGPVPREDQAEAWGCSCCPPETKHQALSGTPKKGPAPSLSPGSSCVKYLIFLSNFPFSLLGLLALAIGLWGLAVKGSLGSDLGGPLPTDPMLGLALGGLVVSAASLAGCLGALCENTCLLRGFSGGILAFLVLEAVAGALVVALWGPLQDSLEHTLRVAIAHYQDDPDLRFLLDQVQLGLRCCGAASYQDWQQNL

SEQ ID NO: 4021 - protein, 147 aa, Homo sapiens
MGKLSPGPQVQPGGAGEQRSDQPVSLSPELTSGDGGRYTEKILQPAGVAQLILGQGCTAVCVPGHRQGHAGSAAQVCPHPACLCVAQQLPTRAGHTHSTDRPSHGHTDKDGFTIDTGADRMCTAFQGLCATQTQGLWASAPPRPRHT

SEQ ID NO: 4022 - protein, 567 aa, Homo sapiens
MEVGSEEEKWEKLDAEFDHFVVDMKPFVLKLPHRTERQRCALWIRKLCEPSGTGAGIMGRKNRNLYAKLLLHMLKRGALEGPFTHRPEPGTLKILPSYMSIYFDEPNPARAKGSSPEGLPAWVLGELETSEHKLNESWKLSSGEDNTLVQSPTDVYSREQYTGKLRVRSHSLSPTHREDGQNITPKICEVYSKKSPVSLDDSDIEARLNSWNLGIENPRYLRQKPIPVSLMTPKFSLRKSSSFHDDHFLSRIREKELDMKTKMMEAKFHEEKLKLQQKHDADVQKILERKNNEIEELKTLYRSKQHETEETIRKLEKKVQTLIRDCQVIRETKEDQIAELKKICEQSTESLNNDWEKKLHNAVAEMEQEKFDLQKQHTENIQELLEDTNVRLNKMESEYMAQTQSTNHMIKELEARVQQLTGEAENSNLQRQKLIQEKAELERCYQITCSELQEVKARRNTLHKEKDHLVNDYEQNMKLLQTKYDADINLLKQEHALSASKASSMIEELEQNVCQLKQQLQESELQRKQQLRDQENKFQMEKSHLKHIYEEKAHDLQSELDKGKEDT

SEQ ID NO: 4023 - protein, 352 aa, Homo sapiens
MVRPVRHKKPVNYSQFDHSDSDDDFVSATVPLNKKSRTAPKELKQDKPKPNLNNLRKEEIPVQEKTPKKRLPEGTFSIPASAVPCTKMALDDKLYQRDLEVALALSVKELPTVTTNVQNSQDKSIEKHGSSKIETMNKSPHISNCSVASDYLDLDKITVEDDVGGVQGKRKAASKAAAQQRKILLEGSDGDSANDTEPDFAPGEDSEDDSDFCESEDNDEDFSMRKSKVKEIKKKEVKVKSPVEKKEKKSKSKCNALVTSVDSAPAAVKSESQSLPKKVSLSSDTTRKPLEIRSPSAESKKPKWVPPAASGGSRSSSSPLVVVSVKSPNQSLRLGLSRLARVKPLHPNATST

SEQ ID NO: 4024 - protein, 102 aa, Homo sapiens [sequence omitted]

SEQ ID NO: 4025 - protein, 479 aa, Homo sapiens
MGFERDSEGDSLGARPGLPYGLSDDESGGGRALSAESEVEEPARGPGEARGERPGPACQLCGGPTGEGPCCGAGGPGGGPLLPPRLLYSCRLCTFVSHYSSHLKRHMQTHSGEKPFRCGRCPYASAQLVNLTRHTRTHTGEKPYRCPHCPFACSSLGNLRRHQRTHAGPPTPPCPTCGFRCCTPRPARPPSPTEQEGAVPRRPEDALLLPDLSLHVPPGGASFLPDCGQLRGEGEGLCGTGSEPLPELLFPWTCRGCGQELEEGEGSRLGAAMCGRCMRGEAGGGASGGPQGPSDKGFACSLCPFATHYPNHLARHMKTHSGEKPFRCARCPYASAHLDNLKRHQRVHTGEKPYKCPLCPYACGNLANLKRHGRIHSGDKPFRCSLCNYSCNQSMNLKRHMLRHTGEKPFRCATCAYTTGHWDNYKRHQKVYGHGGAGGPGLSASEGWAPPHSPPSVLSSRGPPALGTAGSRAVHTDSS

SEQ ID NO: 4026 - protein, 139 aa, Homo sapiens
MALSMSLSSDILSGAPTAGRGGGCSAALSPRGRGSKGLGTRAPGPRGDGQQPPLGTGGDEDPGAGSASAGGSRLAAAAAAEAAAPGDRSLCWAPRGRLLASSPAGEAGSWGRARRGGPRPGAPCKGLAGPPLRPGLARS

SEQ ID NO: 4027 - protein, 125 aa, Homo sapiens
MGPRWGGTAGLREVPPGPHRGLPCRQAGWGARTRLSPPLASVYRWDFFPALSVGGGCTRAGQPQAPSGPHPRPALGGVGMGLGPHLAQDPTLVQLHSWLFACRTEGPGVAWPCRGQHGVGMQGAD

SEQ ID NO: 4028 - protein, 239 aa, Homo sapiens [sequence omitted]

SEQ ID NO: 4029 - protein, 136 aa, Homo sapiens [sequence omitted]

SEQ ID NO: 4030 - protein, 226 aa, Homo sapiens
MKRLRSLLFTATHPHPLSHTHPLTLTHIHSHTHPLTHSHPLSHTYPLTLTHIHTHPHTHISTHTHPLTVTHITHTHLLTHIHSHSFTHAHMHSHTHIHSHTHSHIHSNTPTHTHPLTSTHIQTSTVTHTHSHTHAHKHTYTHTSTHTHPLTFTHTYPITHPLTHTPTHTHTHALTHSHTHIHTHMHSHTHPLTHTSTHTHPHTHNVWLTQDLVFMLMILAHPCRGL

SEQ ID NO: 4031 - protein, 126 aa, Homo sapiens
MDSLAAGELNASHQPWVPEFVAYWRKTHQGNLQTLLLHWLLLCSCLHHLYNASCHPTFPVEYSHAVCCLQPRFWKEMSPFSSSSTTHLFSKCFFYTCLCWAWQQCSSEQNHQPCSHAAYNQVERQT

SEQ ID NO: 4032 - protein, 199 aa, Homo sapiens [sequence omitted]

SEQ ID NO: 4033 - protein, 117 aa, Homo sapiens [sequence omitted]

SEQ ID NO: 4034 - protein, 147 aa, Homo sapiens [sequence omitted]

SEQ ID NO: 4035 - protein, 197 aa, Homo sapiens
MGCCTGRCSLICLCALQLVSALERQIFDFLGFQWAPILGNFLHIIVVILGLFGTIQYRPRYIMVYTVWTALWVTWNVFIICFYLEVGGLSKDTDLMTFNISVHRSWWREHGPGCVRRVLPPSAHGMMDDYTYVSVTGCIVDFQYLEVIHSAVQILLSLVGFVYACYVISISMEEEDTYSCDLQVCKHLFIQMLQIIE

SEQ ID NO: 4036 - protein, 151 aa, Homo sapiens
MSWAGSHPTPAIPGRGGERLALLLAMLGRCCPAGGPESHTPRKPWPPTRRERPGLRSPKPREEAGPRADSKAASPALFMGPGSRGRRRPPSWARRRARGGRGSCPEPHVRAGPASSSHLRPRLPGACEFPARARDSGAVRPRGRKARPGWG

SEQ ID NO: 4037 - protein, 172 aa, Homo sapiens
MRSAPGAGRIAFPPKASRGSTTTAHLSMANSWPRSASTPETRTKFTQDNLCRAQRKRLDSANLWVLVDCILRDTSEDLGLQCDAMNLAFGRRCEELEDARHKLQHHLHKMLREITDQEHNVVALKEAIKDKEEPLHIAQTRLYLPSHRPNMQLCREAAQFSPSSHPPTPPSW

SEQ ID NO: 4038 - protein, 749 aa, Homo sapiens [sequence omitted]

SEQ ID NO: 4039 - protein, 169 aa, Homo sapiens
MRPGCCYHSSRDLKPTNILLGDEGQPVLMDLGSMNQACIHVEGSRQALTLQDWAAQRCTISYRAPELFSVQSHCVIDERTDVWSLGCVLYAMMFGEGPYDMVFQKGDSVALAVQNQLSIPQSPRHSSALRQLLNSMMTVDPHQRPHIPLLLSQLEALQPPAPGQHTTQI

SEQ ID NO: 4040 - protein, 348 aa, Homo sapiens [sequence omitted]

SEQ ID NO: 4041 - protein, 130 aa, Homo sapiens [sequence omitted]

SEQ ID NO: 4042 - protein, 252 aa, Homo sapiens [sequence omitted]

SEQ ID NO: 4043 - protein, 466 aa, Homo sapiens [sequence omitted]

SEQ ID NO: 4044 - protein, 376 aa, Homo sapiens [sequence omitted]

SEQ ID NO: 4045 - protein, 117 aa, Homo sapiens [sequence omitted]

SEQ ID NO: 4046 - protein, 159 aa, Homo sapiens
MDTILVFSLIIASYDANKKDLRDSSCRLEQLPGIFPKDVRSIRELQMQETHTETKRTTFIQNRTIATLQCLGSDSKVKVNLVYLERRPKVKHILKNLRIIAAPRRNSSASSSCHLIPTSKFQTGSLLKGKVSMPRSQEAVPMPVVVEMAKEGRPATWDS

SEQ ID NO: 4047 - protein, 180 aa, Homo sapiens [sequence omitted]

SEQ ID NO: 4048 - protein, 268 aa, Homo sapiens
MCVCQDPTSCPAPQQEALPDETEVVEETVAEVTEVSVGANPVQVEVGEFDDGAEETEEEVVAENPCQNHHCKHGKVCSNDNKTFDSSCHFFATKCTLEGTKKGHKLHLDYIGPCKYIPPCLDSELTEFPLRMRDWLKNVLVTLYERDEDNNLLTEKQKLRVKKIHENEKRLEAGDHPVELLARDFEKNYNMYIFPVHWQFGQLDQHPIDGYLSHTELAPLRAPLIPMEHCTTRFFETCDLDNDKYIALDEWAGCFGIKQKDIDKDLVI

SEQ ID NO: 4049 - protein, 485 aa, Homo sapiens
MALPPFFGQGRPGPPPPQPPPPAPFGCPPPPLPSPAFPPPLPQRPGPFPGASAPFLQPPLALQPRASAEASRGGGGAGAFYPVPPPPLPPPPPQCRPFPGTDAGERPRPPPPGPGPPWSPRWPEAPPPPADVLGDAALQRLRDRQWLEAVFGTPRRAGCPVPQRTHAGPSLGEVRARLLRALRLVRRLRGLSQALREAEADGAAWVLLYSQTAPLRAELAERLQPLTQAAYVGEARRRLERVRRRRLRLRERAREREAEREAEAARAVEREQEIDRWRVKCVQEVEEKKREQELKAAADGVLSEVRKKQADTKRMVDILRALEKLRKLRKEAAARKGVCPPASADETFTHHLQRLRKLIKKRSELYEAEERALRVMLEGEQEEERKRELEKKQRKEKEKILLQKREIESKLFGDPDEFPLAHLLEPFRQYYLQAEHSLPALIQIRHDWDQYLVPSDHPKGNFVPQGWVLPPLPSNDIWATAVKLH

SEQ ID NO: 4050 - protein, 115 aa, Homo sapiens
MAVNYVQHNRFYHEELNAPIRRNKEEPKARPLRVGDTEKPEPERECNKGLGAAWSAQQCGNPWRQDAAGDRVEPGIGAGAYGFQSMLWTMTMCLPLSKPQFPHWNPNRTYLLGLL

SEQ ID NO: 4051 - protein, 269 aa, Homo sapiens
MQPGCAVPQSGRLRGSSRGPGRSGPGMAAAGGGSAVEPRRGGRHHRCPQSARCPAVRSGPLLQTRCPECAGAARQVLALLARPRRRGPGSRSPTPTSAGPACPLFWFHLFCIFMLACYIPWPLSVLWQFPKHLGKKELGQLHNRWGRAGEGPRPDRQSFKGWRAGGLSTLSFGTGVRRQPLATTVSLLCRFTWGWTSPFQLWRVTPQRAWCRDHHQLGRWERRCPRLGEGGNLFPAPQVIVARSGEGTVVPRFPVCQLRDSAVLLCLFD

SEQ ID NO: 4052 - protein, 132 aa, Homo sapiens
MVSVNAPLGAPVESSYGKWGWGKTGQGGTAVSFGRPWDTSPCVSYGPKAPPGAPLEGQEAPRRQCDRFPKLSSRGMACLVREVLGGAEKPWGRGLAHFVCPEAFLGMHLRGLSKTPQRVGLGSTVLFRCGAN

SEQ ID NO: 4053 - protein, 121 aa, Homo sapiens [sequence omitted]

SEQ ID NO: 4054 - protein, 178 aa, Homo sapiens [sequence omitted]

SEQ ID NO: 4055 - protein, 151 aa, Homo sapiens [sequence omitted]

SEQ ID NO: 4056 - protein, 296 aa, Homo sapiens
MDCKVHMETTVSRPVLSPTHINATASETFTVLQQRMRIVEEQTSSLRDDLIMLDFGEKRGYLEAPDCLEDLDSQKVISPIQNEAICAGKTDILWKNCEFLVNRMCRLESLMQSLKMNIFRLQTEKDLNPQKTAFLKDRLNAIQEEHSKDLKLLHLEVMNLRQQLRAVKEEEDKAQDEVQRLTATLKIASQTKKNAAIIEEELKTTKRKMNLKIQELRGQLAQEKYLRESLEKSASAMLLKIQEMGSTVEVERKQVHILQQNCIALRDSIQSAQELLAQEQKKKKSWRLLLHSSNLI

SEQ ID NO: 4057 - protein, 323 aa, Homo sapiens [sequence omitted]

SEQ ID NO: 4058 - protein, 496 aa, Homo sapiens
MDWTWRFLFVVAAVTGVQSEVHLEQSGPEVKMSGSSVRLSCKASGDTFNNFGVNWVRQAPGQGLEWMGGIIPIFGSTDYLWKYQGRVIITADESTRTVYMEVTSLTVEDTALYFCARGGRRPYRNGFDPFDVWGQGTRVSVSSASPTSPKVFPLSLCSTQPDGNVVIACLVQGFFPQEPLSVTWSESGQGVTARNFPPSQDASGDLYTTSSQLTLPATQCLAGKSVTCHVKHYTNPSQDVTVPCPVPSTPPTPSPSTPPTPSPSCCHPRLSLHRPALEDLLLGSEANLTCTLTGLRDASGVTFTWTPSSGKSAVQGPPERDLCGCYSVSSVLPGCAEPWNHGKTFTCTAAYPESKTPLTATLSKSGNTFRPEVHLLPPPSEELALNELVTLTCLARGFSPKDVLVRWLQGSQELPREKYLTWASRQEPSQGTTTFAVTSILRVAAEDWKKGDTFSCMVGHEALPLAFTQKTIDRLAGKPTHVNVSVVMAEVDGTCY

SEQ ID NO: 4059 - protein, 101 aa, Homo sapiens
MGWKLSNTLRSLERLKQRRGGSYCLGHRPRIKGKPENVPSFRWKDAITHTHNHWGVYLSCFSDIMRWGRETLSLPITPPILGHTCRDVWNCMEGHTEGLGG

SEQ ID NO: 4060 - protein, 108 aa, Homo sapiens [sequence omitted]

SEQ ID NO: 4061 - protein, 158 aa, Homo sapiens
MQAALEVTARYCGRELEQYGQCVAAKPESWQRDCHYLKMSIAQCTSSHPIIRQIRQACAQPFEAFEECLRQNEAAVGNCAEHMRRFLQCAEQVQPPRSPATVEVRGAHLSSSLFSITSPSSFWLFRVKTLESSSAPPHHHTGLCHASRIQNIITSCPI

SEQ ID NO: 4062 - protein, 229 aa, Homo sapiens [sequence omitted]

SEQ ID NO: 4063 - protein, 217 aa, Homo sapiens
MSRVEGRSECDGPNPRHQPLLPRPPVPSSSPPTSGTQQPLPPLPSSLQTGPHSLWVPATACSCPQAACWYPPTPTAWTAESVLARSAGPALTPSPSTAMTTAAPGAVEASCPTCAQASASWRRWTVGRPAASSTAMPGAHWAAVCRRSALTRAPPSCPQSAWLPCPRLPGAARAASWASQPPPPTGHGMTVGQWAPGVPSSLHSSVLEPTNPQRRLL

SEQ ID NO: 4064 - protein, 124 aa, Homo sapiens
MACHTLLVCALLVSLLPSCLPFLCWRLIPFMLSPPRCLHCLLGQSYLVPSLFKKQALPIMVEFLSIKGHTFRPPGTSREQCCAQETEFSCVGPAAAIRFQTPTEITKTALCNLEAYIIILSGIK

SEQ ID NO: 4065 - protein, 117 aa, Homo sapiens
MDFYTNIHKSRGDRGSSITASSDTVSPFNYSTRGREDRKGAAEAALRAEAARWRSVGARMRENLAELDRAASGGAAECPASGGAKVRSAWDAPPERRGEGTGLAARRRSHANQLRHP

SEQ ID NO: 4066 - protein, 125 aa, Homo sapiens [sequence omitted]

SEQ ID NO: 4067 - protein, 640 aa, Homo sapiens
MPPRVTFQPCGWQWNQDTPLNSEYDFALVNIGRLEAVSGLSRVQLLRPGSLHKFIPEEILIHGRDFRLLRVGFEAGGLEPQAFQVTMAIVQARAQSNQAQQYSGITLSKAGQGSGSRKPPIPLMETAEDWETERKKQAARGWRVSTVNERFDVATSLPRYFWVPNRILDSEVRRAFGHFHQGRGPRLSWHRPGGSDLLRCGGFYTASDPNKEDIRAVELMLQAGHSDVVLVDTMDELPSLADVQLAHLRLRALCLPDSSVAEDKWLSALEGTRWLDYVRACLRKASDISVLVTSRVRSVILQERGDRDLNGLLSSLVQLLSAPEARTLFGFQSLVQREWVAAGHPFLTRLGGTGASEEAPVFLLFLDCVWQLLQQFPADFEFSEFFLLALHDSVRVPDTLTFLRNTPWERGKQSGQLNSYTQVYTPGYSQPPAGNSFNLQLSVWDWDLRYSNAQILQFQNPGYDPEHCPDSWLPRPQPSFMVPGPPSSVWLFSRGALTPLNQLCPWRDSPSLLAVSSRWLPRPAISSESLADQEWGLPSHWGACPLPPGLLLPGYLGPQIRLWRRCYLRGRPEVQMGLSAPTISGLQDELSHLQELLRKWTPRISPEDHSKKRDPHTILNPTEIAGILKGQSHPFWITRC

SEQ ID NO: 4068 - protein, 538 aa, Homo sapiens
MAAEQDPEARAAARPLLTDLYQATMALGYWRAGRARDAAEFELFFRRCPFGGAFALAAGLRDCVRFLRAFRLRDADVQFLASVLPPDTDPAFFEHLRALDCSEVTVRALPEGSLAFPGVPLLQVSGPLLVVQLLETPLLCLVSYASLVATNAARLRLIAGPEKRLLEMGLRRAQGPDGGLTASTYSYLGGFDSSSNVLAGQLRGVPVAGTLAHSFVTSFSGSEVPPDPMLAPAAGEGPGVDLAAKAQVWLEQVCAHLGLGVQEPHPGERAAFVAYALAFPRAFQGLLDTYSVWRSGLPNFLAVALALGELGYRAVGVRLDSGDLLQQAQEIRKVFRAAAAQFQVPWLESVLIVVSNNIDEEALARLVQEGSEVNVIGIGTSVVTCPQQPSLGGVYKLVAVGGQPRMKLTEDPEKQTLPGSKAAFRLLGSDGSPLMDMLQLAEEPVPQAGQELRVWPPGAQEPCTVRPAQVEPLLRLCLQQGQLCEPLPSLAESRALAQLSLSRLSPEHRRLRSPAQYQVVLSERLQALVNSLCAGQSP

SEQ ID NO: 4069 - protein, 250 aa, Homo sapiens
MWVKQSPGVRYLLSELLGALWPRPTPAYLLTLASPFLTFSLPIKLEIPQRSQTPLQPLVSPGEQTPCFFPATLPTQRGSSRDAHTSCWSLRRARGPWGAAPWAGRGRWSGVPRGSGHLHVGPVFWQPWGGWPPFLLVLWSQRRVLWPDQALAFPVLRPQKPQEHGLGMAQPAAPSLTRPFLAEAPTALVPHSPLPGALSSAPGPKQPPTASTGPELLLLPLSSFMPCGAAAPARVRPPPPGLGTGALTLV

SEQ ID NO: 4070 - protein, 106 aa, Homo sapiens [sequence omitted]

SEQ ID NO: 4071 - protein, 146 aa, Homo sapiens
MGLAVSLAFLGAFLSSIAAGLPCIRAPTFLRAFGASGVDGSLSLSLQGQVWINGFNLGRYWPARGPQLTLFVPQHILMTSAPNTITVLELEWAPCSSDDPELCAVTFVDRPVIGSSVTYDHPSKPVEKRLMPPPPQKNKDSWLDHV

SEQ ID NO: 4072 - protein, 433 aa, Homo sapiens
MRSVSEGSREEVRLQPRPRKDWDFRLNAVEAHGRKRTLPPSLRMPEGPELHLASQFVNEACRALVFGGCVEKSSVSRNPEVPFESSAYRISASARGKELRLILSPLPGAQPQQEPLALVFRFGMSGSFQLVPREELPRHAHLRFYTAPPGPRLALCFVDIRRFGRWDLGGKWQPGRGPCVLQEYQQFRENVLRNLADKAFDRPICEALLDQRFFNGIGNYLRAEILYRLKIPPFEKARSVLEALQQHRPSPELTLSQKIRTKLQNPDLLELCHSVPKEVVQLGGRGYGSESGEEDFAAFRAWLRCYGMPGMSSLQDRHGRTIWFQGDPGPLAPKGRKSRKKKSKATQLSPEDRVEDALPPSKAPSRTRRAKRDLPKRTATQRPEGTSLQQDPEAPTVPKKGRRKGRQAASGHCRPRKVKADIPSLEPEGTSAS

SEQ ID NO: 4073 - protein, 472 aa, Homo sapiens [sequence omitted]

SEQ ID NO: 4074 - protein, 112 aa, Homo sapiens
MMGGSSAAAPGAGAWEAWERSGVGAYADLGQQARTLRGGFSGAALPWAARLSLVCASLFCEPSPSCGSYWGHSAVGVCLWDPSHTAPYTLLTPRAVTPFYVALKGLCLPDSD

SEQ ID NO: 4075 - protein, 177 aa, Homo sapiens
MWTVPSFTNDSYQVYNVFSTNSFQLLTVKRTPHEAWRVPLTTKTNKTKGLPDCPKKPTNGPFIVTSILWDNCNAPKAVVLQTLAMGIVIDWAPKGHYWQDCSSKNTLCSEFIYSLDYIEHGWQSYTMRQRVSPYPFKWMDTGIAPPRPKIIHPFFTPEHPELWKLAAALSGIKIWNT

SEQ ID NO: 4076 - protein, 274 aa, Homo sapiens [sequence omitted]

SEQ ID NO: 4077 - protein, 130 aa, Homo sapiens [sequence omitted]

SEQ ID NO: 4078 - protein, 494 aa, Homo sapiens
MEFGLSWVFLVAILKGVQCEVDLVQFGGGVVQPGGSLKLSCAASGITVSSVYMSWVRQAPGKGLEWVSVIYANGDTYYAASVKGRFTISRDNSENALYLQMNSLRVEDAAVYYCVRNYYDSSGFSTAIDYWGQGSLVIVTSASPTSPKVFPLSLCSTQPDGNVVIACLVQGFFPQEPLSVTWSESGQGVTARNFPPSQDASGDLYTTSSQLTLPATQCLAGKSVTCHVKHYTNPSQDVTVPCPVPSTPPTPSPSTPPTPSPSCCHPRLSLHRPALEDLLLGSEANLTCTLTGLRDASGVTFTWTPSSGKSAVQGPPDRDLCGCYSVSSVLPGCAEPWNHGKTFTCTAAYPESKTPLTATLSKSGNTFRPEVHLLPPPSEELALNELVTLTCLARGFSPKDVLVRWLQGSQELPREKYLTWASRQEPSQGTTTFAVTSILRVAAEDWKKGDTFSCMVGHEALPLAFTQKTIDRLAGKPTHVNVSVVMAEVDGTCY

SEQ ID NO: 4079 - protein, 355 aa, Homo sapiens
MQRNAMYLKNVAETACNFQLTQYQISHANQKPYECQICGKPFRKRAHLTQHNRIHTGGKPYECKECGKVFICCSTLIQHKRTHTSEKPYECLECRKTFRRSAHLIRHQRIHTGEKPYKCKQCWKAFASVSDLIDIGKFTLMRDFTNVQNVGRHLTIAQLLFSIREFTLVRSPLNVRNVAKHSIIAQHLLNTRELILMRNLMNVRNVKRLLGKVHILLNIKEFILVRNHMSVSNVGRLSLVFLILIDIREFTLVKNPMNVKNVVELLTIVQLLFNTREFTLVRRLMNISSVGRFLSPVQHLFNIREHILMKNLMNVSNARRPSSIMHILFDIKEFILVRNLINVSNVGRPLLLFLI

SEQ ID NO: 4080 - protein, 512 aa, Homo sapiens
MRSRNQGGESASDGHISCPKPSIIGNAGEKSLSEDAKKKKKSNRKEDDVMASGTVKRHLKTSGECERKTKKSLELSKEDLIQLLSIMEGELQAREDVIHMLKTEKTKPEVLEAHYGSAEPEKVLRVLHRDAILAQEKSIGEDVYEKPISELDRLEEKQKETYRRMLEQLLLAEKCHRRTVYELENEKHKHTDYMNKSDDFTNLLEQERERLKKLLEQEKAYQARKEKENAKRLNKLRDELVKLKSFALMLVDERQMHIEQLGLQSQKVQDLTQKLREEEEKLKAITSKSKEDRQKLLKLEVDFEHKASRFSQEHEEMNAKLANQESHNRQLRLKLVGLTQRIEELEETNKNLQKAEEELQELRDKIAKGECGNSSLMAEVENLRKRVLEMEGKDEEITKTESQCRELRKKLQEEEHHSKEFRLEVEKLQKRMSELEKLEEAFSKSKSECTQLHLNLEKEKNLTKDLLNELEVVKSRVKELECSESRLEKAELSLKDDLTKLKSFTVMLVDER

SEQ ID NO: 4081 - protein, 145 aa, Homo sapiens
MHVMAASMARGGVSARVLLQAARGTWWNRPGGTSGSGEGVALGTTRKFQATGSRPAGEEDAGGPERPGDVVNVVFVDRSGQRIPVSGRVGDNVLHLAQRHGVDLEGACEASLACSTCHVYVSEDHLDLLPPPEERRTRGWAARLC

SEQ ID NO: 4082 - protein, 107 aa, Homo sapiens
MEPPGGASCRKLLCLCAARTTWGWTGDDDFNTHLPAATGPPPTHLKSLRVPADIRGCQYSGPPGRRPLPRTGILTGLPWPPPLRFGDHSSASQNSPWGGRGGVWRRL

SEQ ID NO: 4083 - protein, 192 aa, Homo sapiens
MVHLLVLRYNLKITSLIDALGSNSFSCSRYRGEGIVYGTLEEVWDCVKPAVGGLRVKWDENVTGFEIIQSITDTLCVSRTSTPSAAMKLISPRDFVDLVLVKRYEDGTISSNATHVEHPLCPPKPGFVRGFNHPCGCFCEPLPGEPTKTNLVTFFHTDLSGYLPQNVVDSFFPRSMTRFYANLQKAVKQFHE

SEQ ID NO: 4084 - protein, 275 aa, Homo sapiens
MEAKTRELIARRTTPLLEYIKNRKLEKQRIREEKREERRRRELEKKRLREEEKRRRREEERCKKKETDKQKKIAEKEVRIKLLKKPEKGEEPTTEKPKERGEEIDTGGGKQESCAPGAVVKARPMEGSLEEPQETSHSGSDKEHRDVERSQEQESEAQRYHVDDGRRHRAHHEPERLSRRSEDEQRWGKGPGQDRGKKGSQDSGAPGEAMERLGRAQRCDDSPAPRKERLANKDRPALQLYDPGARFRARECGGNRRICKAEGSGTGPEKREEAE

SEQ ID NO: 4085 - protein, 495 aa, Homo sapiens
MDWTWRVFCLLAVVPGGHPQVQLVQSGAEVKKPGAAVKVSCKASGDIFTTHYLHWVRQAPGQGPEWMGIMSPSGDRITYSQKFRGRVSMTRDTSTGTVYMELTSLRLDDTAVYYCAGEADSAVRTWAFFDYWGQGTSVTVSSASPTSPKVFPLSLCSTQPDGNVVIACLVQGFFPQEPLSVTWSESGQGVTARNFPPSQDASGDLYTTSSQLTLPATQCLAGKSVTCHVKHYTNPSQDVTVPCPVPSTPPTPSPSTPPTPSPSCCHPRLSLHRPALEDLLLGSEANLTCTLTGLRDASGVTFTWTPSSGKSAVQGPPERDLCGCYSVSSVLPGCAEPWNHGKTFTCTAAYPESKTPLTATLSKSGNTFRPEVHLLPPPSEELALNELVTLTCLARGFSPKDVLVRWLQGSQELPREKYLTWASRQEPSQGTTTFAVTSILRVAAEDWKKGDTFSCMVGHEALPLAFTQKTIDRLAGKPTHVNVSVVMAEVDGTCY

SEQ ID NO: 4086 - protein, 807 aa, Homo sapiens
MDPVGLQLGNKNLWSCLVRLLTKDPEWLNAKMKFFLPNTDLDSRNETLDPEQRVILQLNKLHVQGSDTWQSFIHCVCMQLEVPLDLEVLLLSTFGYDDGFTSQLGAEGKSQPESQLHHGLKRPHQSCGSSPRRKQCKKQQLELAKKYLQLLRTSAQQRYRSQIPGSGQPHAFHQVYVPPILRRATASLDTLEGAIMGDVKVEDGADVSISDLFNTRVNKGPRVTVLLGKAGMGKTTLAHRLCQKWAEGHLNCFQALFLFEFRQLNLITRFLTPSELLFDLYLSPESDHDTVFQYLEKNADQVLLIFDGLDEALQPMGPDGPGPVLTLFSHLCNGTLLPGCRVMATSRPGKLPACLPAEAAMVHMLGFDGPRVEEYVNHFFSAQPSREGALVELQTNGRLRSLCAVPALCQVACLCLHHLLPDHAPGQSVALLPNMTQLYMQMVLALSPPGHLPTSSLLDLGEVALRGLETGKVIFYAKDIAPPLIAFGATHSLLTSFCVCTGPGHQQTGYAFTHLSLQEFLAALHLMASPKVNKDTLTQYVTLHSRWVQRTKARLGLSDHLPTFLAGLASCTCRPFLSHLAQGNEDCVGAKQAAVVQVLKKLATRKLTGPKVVELCHCVDETQEPELASLTAQSLPYQLPFHNFPLTCTDLATLTNILEHREAPIHLDFDGCPLEPHCPEALVGCGQIENLSFKSRKCGDAFAEALSRSLPTMGRLQMLGLAGSKITARGISHLVKALPLCPQLKEVSFRDNQLSDQVVLNIVEVLPHLPRLRKLDLSSNTDLYQKKKKKKKKNWSGIVACICGPRY

SEQ ID NO: 4087 - protein, 224 aa, Homo sapiens [sequence omitted]

SEQ ID NO: 4088 - protein, 120 aa, Homo sapiens [sequence omitted]

SEQ ID NO: 4089 - protein, 153 aa, Homo sapiens
MGKEEERTPGGPDGHTVNPPRDFRQREGLHNTPVFCLPSLTPFPVHTGQPKANPTVTLFPPSSEELQANKATLVCLISDFYPGAVTVAWKADGSPVEAGVETTKPSKQSNNKYAASSYLSLTPEQWKSHRSYSCQVTHEGSTVEKTVAPTECS

SEQ ID NO: 4090 - protein, 450 aa, Homo sapiens
MSQAYSSSQRVSSYRRTFGGAPGFPLGSPLSSPVFPRAGFGSKGSSSSVTSRVYQVSRTPSSYGAGELLDFSLADAVNQEFLTTRTNEKVELQELNDRFANYIEKVRFLEQQNAALAAEVNRLKGREPTRVAELYEEELRELRRQVEVLTNQRARVDVERDNLLDDLQRLKAKLQEEIQLKEEAENNLAAFRADVDAATLARIDLERRIESLNEEIAFLKKVHEEEIRELQAQLQEQQVQVEMDMSKPDLTAALRDIRAQYETIAAKNISEAEEWYKSKVSDLTQAANKNNDALRQAKQEMMEYRHQIQSYTCEIDALKGTNDSLMRQMRELEDRFASEASGYQDNIARLEEEIRHLKDEMARHLREYQDLLNVKMALDVEIATYRKLLEGEESRINLPIQTYSALNFRETSPEQRGSEVHTKKTVMIKTIETRDGEVVSEATQQQHEVL

SEQ ID NO: 4091 - protein, 197 aa, Homo sapiens
MTCSPLLLTLLIHCTGSWAQSVLTQPPSVSAAPGQSVSFSCSGGSIGGNSVSWYQQVPGTAPKLLIYENSKRPSGAPDRISGSKFGTSATLAISGLQTGDEAHYYCGTWDASLHTWVFGVGTKLTVLGESLLPSPSPLLGQSLVFFLSWFDLWSPFFLQLRPDHGPLPSLLRPLLASLGHYLHFTSDRRGRGVDTVS

SEQ ID NO: 4092 - protein, 407 aa, Homo sapiens
MAAAALRFPVQGTVTFEDVAVKFTQEEWNLLSEAQRCLYRDVTLENLALMSSLGCWCGVEDEAAPSKQSIYIQRETQVRTPMAGVSPKKAHPCEMCGPILGDILHVADHQGTHHKQKLHRCEAWGNKLYDSGNFHQHQNEHIGEKPYRGSVEEALFAKRCKLHVSGESSVFSESGKDFLLRSGLLQQEATHTGKSNSKTECVSLFHGGKSHYSCGGCMKHFSTKDILSQHERLLPTEEPSVWCECGKSSSKYDSFSNHQGVHTREKPYTCGICGKLFNSKSHLLVHQRIHTGEKPYECEVCQKFFRHKYHLIAHQRVHTGERPYECSDCGKSFTHSSTFRVHKRVHTGQKPYECSECGKSFAESSSLTKHRRVHTGEKPYGCSECEKKFRQISSLRHHQRVHKRKGL

SEQ ID NO: 4093 - protein, 103 aa, Homo sapiens
MVEGPCSTQRTKLWKFILSELSDRRLMISKLWVVILHNLNIVFHFFTIHWGDCDDPASALLDCLPWTAGLHLLQVWSSLVHADGDTSLNCLQQRPGQPPRLLI

SEQ ID NO: 4094 - protein, 199 aa, Homo sapiens
MLSLEETEAGEEGSRITLPGGGGCRRGDFPWDDEDFRSLALLGAGVAMGFFYLYFRDPGREITWKHFVQYYLARGLVDRLEVVNKQSVRVIPAPGTSSEGAMLTGPPGTGKTLLAKATAGEATVPFITVNGSEFLEMFIGVGPARGSTLPPTSWCWLAPTALTSWTRPSCGLAGFIARFTLVPLTLKAGPPSLRSTCAH

SEQ ID NO: 4095 - protein, 567 aa, Homo sapiens
MGTTARAALVLTYLAVASAASEGGFTATGQRQLRPEHFQEVGYAAPPSPPLSRSLPMDHPDSSQHGPPFEGQSGKEGRGPRPHSQPWLGERVGCSHIPPSIVQPPPSQEATPLQQEKLLPAQLPAEKEVGPPLPQEAVPLQKELPSLQHPNEQKEGTPAPFGDQSHPEPESWNAAQHCQQDRSQGGWGHRLDGFPPGRPSPDNLNQICLPNRQHVVYGPWNLPQSSYSHLTRQGETLNFLEIGYSRCCHCRSHTNRLECAKLVWEEAMSRFCEAEFSVKTRPHWCCTRQGEARFSCFQEEAPQPHYQLRACPSHQPDISSGLELPFPPGVPTLDNIKNICHLRRFRSVPRNLPATDPLQRELLALIQLEREFQRCCRQGNNHTCTWKAWEDTLDKYCDREYAVKTHHHLCCRHPPSPTRDECFARRAPYPNYDRDILTIDIGRVTPNLMGHLCGNQRVLTKHKHIPGLIHNMTARCCDLPFPEQACCAEEEKLTFINDLCGPRRNIWRDPALCCYLSPGDEQVNCFNINYLRNVALVSGDTENAKGQGEQGSTGGTNISSTSEPKEE

SEQ ID NO: 4096 - protein, 112 aa, Homo sapiens
MQHLLQSQEIQMSQGKGGYSHRTSDTGQGANTDKPIRGLPTPHTYAMMESRVSTPDSSQIYAHLRKSRWAATCQGLSLRRWSADLSRGGGGVRAYRFLSSCAFRCSCSVLTR

SEQ ID NO: 4097 - protein, 410 aa, Homo sapiens
MNDEDYSTIYDTIQNERTYEVPDQPEENESPHYDDVHEYLRPENDLYATQLNTHEYDFVSVYTIKGEETSLASVQSEDRGYLLPDEIYSELQEAHPGEPQEDRGISMEGLYSSTQDQQLCAAELQENGSVMKEDLPSPSSFTIQHSKAFSTTKYSCYSDAEGLEEKEGAHMNPEIYLFVKAGIDGESIGNCPFSQRLFMILWLKGVVFNVTTVDLKRKPADLHNLAPGTHPPFLTFNGDVKTDVNKIEEFLEETLTPEKYPKLAAKHRESNTAGIDIFSKFSAYIKNTKQQNNAALERGLTKALKKLDDYLNTPLPEEIDANTCGEDKGSRRKFLDGDELTLADCNLLPKLHVVKIVAKKYRNYDIPAEMTGLWRYLKNAYARDEFTNTCAADSEIELAYADVAKRLSRS

SEQ ID NO: 4098 - protein, 247 aa, Homo sapiens
MAARVLRARGAAWAGGLLQRAAPCSLLPRLRTWTSSSNRSREDSWLKSLFVRKVDPRKDAHSNLLAKKETSNLYKLQFKRCCQRFTKINTTLVLWWGLGTRGMASRTKLEFLEFRKARSDMLLSRKNQLLLEFSFWNEPVPRSGPNIYELRSYQLRPGTMIEWGNYWARAIRFRQDGNEAVGGFFSQIGQLYMVHHLWAYRDLQTREDIRNAAWHKHGWEELVYYTVPLIQEMESRIMIPLKTSPLQ

SEQ ID NO: 4099 - protein, 149 aa, Homo sapiens
MPSIACLVLCTWSCVPSIEIPECLPGLGACVVCPALCAQVCASSLVGPECAWHTGLVLSPWHFVPGMFAQHCVPCMVSQRLRLLWCVWLCVSGIACSLLYTYCVCPAWGACIVFLALWFQSSVSALHAWCCVGGITWLVCTWLVCDPAL

SEQ ID NO: 4100 - protein, 185 aa, Homo sapiens [sequence omitted]

SEQ ID NO: 4101 - protein, 526 aa, Homo sapiens
MCGIVGTREAFFSKTKRFCSVSCSRSYSSNSKKASILARLQGKPPTKKAKVLHKAAWSAKIGAFLHSQGTGQLADGTPTGQDALVLGFDWGKFLKDHSYKAAPVSCFKHVPLYDQWEDVMKGMKVEVLNSDAVLPSRVYWIASVIQTAGYRVLLRYEGFENDASHDFWCNLGTVDVHPIGWCAINSKILVPPRTIHAKFTDWKGYLMKRLVGSRTLPVDFHIKMVESMKYPFRQGMRLEVVDKSQVSRTRMAVVDTVIGGRLRLLYEDGDSDDDFWCHMWSPLIHPVGWSRRVGHGIKMSERRSDMAHHPTFRKIYCDAVPYLFKKVRAVYTEGGWFEEGMKLEAIDPLNLGNICVATVCKVLLDGYLMICVDGGPSTDGLDWFCYHASSHAIFPATFCQKNDIELTPPKGYEAQTFNWENYLEKTKSKAAPSRLFNMDCPNHGFKVGMKLEAVDLMEPRLICVATVKRVVHRLLSIHFDGWDSEYDQWVDCESPDIYPVGWCELTGYQLQPPVAAGVGSRGPKRL

SEQ ID NO: 4102 - protein, 152 aa, Homo sapiens
MGARLGRRAGPEAGSEAGAAAGCGPAPYERRVRWLREIQSTLRERRPERARQLLRLLRQAREGAVRPWAGGQGGSGGLGVWEARGYGLWACIRREARRSWSLARAGGFRGRDRLQHAGSCVGERATAWSEGWVRSADRVEEGAAECVRVFGV

SEQ ID NO: 4103 - protein, 123 aa, Homo sapiens
MWTQRWKRSVSPGPADIRFVWEKNGRALETCVPVQTHALPDGRAHALSWLQDAIRESAEYRCSVLSSAGNKTSKVQVAVMRPEVTHQERWTRELSAWRAVAGEHDRMMQSWRKAWESCSKDTL

SEQ ID NO: 4104 - protein, 193 aa, Homo sapiens
MGMCSRQDRIQKDIDVVIQKSRAEDCLFAGLFKGLKAKGEDGLIQQVLVVRPGECQTLLPARGPMSHPHHDPCPGGAPVRDTGSEDGSGSSSAASKVTGQSGHRLPHWVKEAQRTGRAIPGAHRPFSFPWAPRRFRYVSGPGRFRQLLMKARGKVVLVPESPNLRISNETNTIHHSNLFSFPKPCTVVLSGGL

SEQ ID NO: 4105 - protein, 113 aa, Homo sapiens
MINQLIDMEWKFGVTSGSSELEKVGSIFLQLKLVVKKGNQTENVYIGESEFPLEPLHLFCVLCNQGLVTLTTNHVFYKNSHCQLWSSCSTAFPLLKDGTRSVRKPLAGWSPHS

SEQ ID NO: 4106 - protein, 158 aa, Homo sapiens
MSNLSQDELARIRAHRQLVFRYHVVGCRRLRSEDLLEQGYATALSGHPLRFSEREGSIYLNDFARVVSSDHEAVNGILHFIDRVLLPPEALHWEPDDAPIPRRNVTAAAQGFGYKIFSGLLKVLLPCGPVIVDTHARVCASVYAYLCVHTHLCAHCPV

SEQ ID NO: 4107 - protein, 192 aa, Homo sapiens
MKVQSFGERVVLFILNAIIFGRLERNLDDDDMFFLPHSVKEQAKILWRRGAAVGFYTTKMKGRLCGDGTGACYLLPVFDTVFIRRKHWHRGLGTAMLRDFCETFPEDEALGVSCPMPPAMYQAHPGNSEDVSRHARTSQNDRPRQPAPGDGSKERMCGEELEDTKDDPECGVEEEDAGLAGQPPGKLTRSSP

SEQ ID NO: 4108 - protein, 109 aa, Homo sapiens
MCTAVTSVLFCVWKTDWGEIALSPNSNFLFLSSFFCFLFSLSPSILHIFPIKKYCIIYLPTRHLFQIFWFCLQGTFFCIQLHTFKILWPGSVAHACNPSTLGGRVGWIA

SEQ ID NO: 4109 - protein, 251 aa, Homo sapiens [sequence omitted]

SEQ ID NO: 4110 - protein, 199 aa, Homo sapiens
MSYGRPPPDVEGMTSLKVDNLTYRTSPDTLRRVFEKYGRVGDVYIPRDRYTKESRGFAFVRFHDKRDAEDATDAGAAALGGVAAADPGVGAVPGLAADLATAARSLGPALVLDLGRPPSPDPHEGPSPSPRRSPDLVRGPGPGLGPGVLPQCPRGNPNPGRDRRVPPSLLKRKERCPLKKMVMSGNPRHITLIHKWDLG

SEQ ID NO: 4111 - protein, 213 aa, Homo sapiens
MDIPPLAGKIAALSLSALPVSYALNHVSALSHPLWVALMSALILGLLFVAVYSLSHGEVSYDPLYAVFAVFAFTSVVDLIIALQEDSYVVGFMEFYTKEVLGGRPGSPLPHCPSESPTCPHRESHTCAQRTESSSATGMALFTTSSTWPWPAPSAEGAGGRERVAPDPGREVASSDGVPGQGGARSVCRRNQDASLGLQPGVARRRFQGTSQV

SEQ ID NO: 4112 - protein, 595 aa, Homo sapiens [sequence omitted]

SEQ ID NO: 4113 - protein, 466 aa, Homo sapiens
MTLLPCRVCWRVTVCERICYGGSGSSLPRLLLAATRAEGSEAAELAEIYAKLEEIEADKAPARASVILAGLGFTPKMQQQPTREFSGGWRMRLALARALFARPDLLLLDEPTNMLDVRAILWLENYLQTWPSTILVVSHDRNFLNAIATDIIHLHSQRLDGYRGDFETFIKSKQERLLNQQREYEAQQQYRQHIQVFIDRFRYNANRASQVQSKLKMLEKLPELKPVDKESEVVMKFPDGFEKFSPPILQLDEVDFYYDPKHVIFSRLSVSADLESRICVVGENGAGKSTMLKLLLGDLAPVRGIRHAHRNLKIGYFSQHHVEQLDLNVSAVELLARKFPGRPEEEYRHQLGRYGISGELAMRPLASLSGGQKSRVAFAQMTMPCPNFYILDEPTNHLDMETIEALGRALNNFRGGVILVSHDERFIRLVCRELWVCEGGGVTRVEGGFDQYRALLQEQFRREGFL

SEQ ID NO: 4114 - protein, 495 aa, Homo sapiens
MELGLCWVFLVAILEGVQCEVQLVESGGGLVEVGGSLRLSCMVSGFFLTSYEMNWVRQTPGKGLEWVAYSSSLGSATYYADSVKGRFIISRDYAENSLHLQMNSLRVDDTAIYFCTRLRGDGGYAKSANDYWGQGTLVSVSSASPTSPKVFPLSLCSTQPDGNVVIACLVQGFFPQEPLSVTWSESGQGVTARNFPPSQDASGDLYTTSSQLTLPATQCLAGKSVTCHVKHYTNPSQDVTVPCPVPSTPPTPSPSTPPTPSPSCCHPRLSLHRPALEDLLLGSEANLTCTLTGLRDASGVTFTWTPSSGKSAVQGPPERDLCGCYSVSSVLPGCAEPWNHGKTFTCTAAYPESKTPLTATLSKSGNTFRPEVHLLPPPSEELALNELVTLTCLARGFSPKDVLVRWLQGSQELPREKYLTWASRQEPSQGTTTFAVTSILRVAAEDWKKGDTFSCMVGHEALPLAFTQKTIDRLAGKPTHVNVSVVMAEVDGTCY

SEQ ID NO: 4115 - protein, 438 aa, Homo sapiens
MNVRIFYSVSQSPHSLLSLLFYCAILESRISATMPLFKLPEIDDAMRNFAEKVFASEVKDEGGRQEISPFDVDEICLISHHEMQAHIFHLETLSTSTEARRKKRFQGRKTVNLSIPLSETSSTKLSHIDEYISSSPTYQTVPDFQRVQITGDYASGVTVEDFEIVCKGLYRALCTREKYMQKSFQRFPKTPSKYLRNIDGEAWVANESFYPVFTPPVKKGEDPFRTDNLPENLGYHLKMKDGVVYVYPNEAAVSKDEPKPLPYPNLDTFLDDMNFLLALIAQGPVKTYTHRRLKFLSSKFQVHQMLNEMDELKELKNNPHQDFYNCRKVDTHIHAAACMNQKHLLRFIKKSYQIDADRVVYSTKEKNLTLKELFAKLKMHPYDLTVDSLDVHAGRQTFQRFDKFNDKYNPVGASELRDLYLKTDNYINGDILPLSSRR

SEQ ID NO: 4116 - protein, 666 aa, Homo sapiens [sequence omitted]

SEQ ID NO: 4117 - protein, 128 aa, Homo sapiens; identical to SEQ ID NO: 3137

SEQ ID NO: 4118 - protein, 155 aa, Homo sapiens
MASGRWAPLGPAWASRRPPQAQIVPKSVSPGLAPASRRPLQAQVVLKSAWKWAWKSSKSASLGPAPSSRRPLQVQNFLESASPGPAPPASQWPLSAQPSSWLSAAFPGPAFDFWQPLQAQNLISSRPLQARPPASRRPARAQPRPRPHSGLSTPS

SEQ ID NO: 4119 - protein, 242 aa, Homo sapiens
MPYFLLQHRNTAWPQYKLDNVSKWPENGTFDFSILQDLNNFCRKMGKWSEVPYVQAFFTLRSLPSLCSQCDSSQILLLSLPPVPSVPTPSVAESSQSSFSTDPSDLSPPPQAACRQTELSPNTSSASTPPPYNPSITSPPHTWSGLQFSSATSASPPAQQFPLREVAGAEGIVKVHVLFSLSDLSQISQCLGSFSSDPTKYIQEFQYLTLSYNLTWSDLNVILTSTLSPDERESFFSSPISC

SEQ ID NO: 4120 - protein, 115 aa, Homo sapiens [sequence omitted]

SEQ ID NO: 4121 - protein, 120 aa, Homo sapiens
MAFSFFFLSFFFETQFRSCCPGWSAMARSQPPPPGFKRFSCLSLPSSWDYKHVSPHPANFVFLVETGFLHVGQAGLELPTSGDLPASASQSAGITGGSHFAWPGICLFLLLCFILIFVLE

SEQ ID NO: 4122 - protein, 919 aa, Homo sapiens
MLIHKTEDVNTLDSEKRTPLHVAAFLGDAEIIELLILSGARVNAKDNMWLTPLHRAVASRSEEAVQVLIKHSADVNARDKNWQTPLHVAAANKAVKCAEVIIPLLSSVNVSDRGGRTALHHAALNGHVEMVNLLLAKGANINAFDKKDRRALHWAAYMGHLDVVALLINHGAEVTCKDKKGYTPLHAAASNGQINVVKHLLNLGVEIDEINVYGNTALHIACYNGQDAVVNELIDYGANVNQPNNNGFTPLHFAAASTHGALCLELLVNNGADVNIQSKDGKSPLHMTAVHGRFTRSQTLIQNGGEIDCVDKDGNTPLHVAARYGHELLINTLRTSGADTAKCGIHSMFPLHLAALNAHSDCCRKLLSSGFEIDTPDKFGRTCLHAAAAGGNVECIKLLQSSGADFHKKDKCGRTPLHYAAANCHFHCIETLVTTGANVNETDDWGRTALHYAAASDMDRNKTILGNAHDNSEELERARELKEKEATLCLEFLLQNDANPSIRDKEGYNSIHYAAAYGHRQCLELLLERTNSGFEESDSGATKSPLHLAAYNGHHQALEVLLQSLVDLDIRDEKGRTALDLAAFKGHTECVEALINPGASIFVKDNVTKRTPLHASVINGHTLCLRLLLEIADNPEAVDVKDAKGQTPLMLAVAYGHIDAVSLLLEKEANVDTVDILGCTALHRGIMTGHEECVQMLLEQEVSILCKDSRGRTPLHYAAARGHATWLSELLQMALSEEDCCFKDNQGYTPLHWACYNGNENCIEVLLEQKCFRKFIGNPFTPLHCAIINDHGNCASLLLGAIDSSIVSCRDDKGRTPLRAAAFADHVECLQLLLRHSAPVNAVDNSGKTALMMAAENGQAGAVDILVNSAQADLTVKDKDLNTPLHLACSKGHEKCALLILDKIQDESLINEKNNALQT

SEQ ID NO: 4123 - protein, 667 aa, Homo sapiens
MMSLSVRPQRRLLSARVNRSQSFAGVLGSHERGPRSFPVFSPPGPPRKPPALSRVSRMFSVAHPAAKVPQPERLDLVYTALKRGLTAYLEVHQQEQEKLQGQIRESKRNSRLGFLYDLDKQVKSIERFLRRLEFHASKIDELYEAYCVQRRLRDGAYNMVRAYTTGSPGSREARDSLAEATRGHREYTESMCLLESELEAQLGEFHLRMKGLAGFARLCVGDQYEICMKYGRQRWKLRGRIEGSGKQVWDSEETIFLPLLTEFLSIKVTELKGLANHVVVGSVSCETKDLFAALPQVVAVDINDLGTIKLSLEVTWSPFDKDDQPSAASSVNKASTVTKRFSTYSQSPPDTPSLREQAFYNMLRRQEELENGTAWSLSSESSDDSSSPQLSGTARHSPAPRPLVQQPEPLPIQVAFRRPETPSSGPLDEEGAVAPVLANGHAPYSRTLSHISEASVDAALAEASVEAVGPESLAWGPSPPTHPAPTHGEHPSPVPPALDPGHSATSSTLGTTGSVPTSTDPAPSAHLDSVHKSTDSGPSELPGPTHTTTGSTYSAITTTHSAPSPLTHTTTGSTHKPIISTLTTTGPTLNIIGPVQTTTSPTHTMPSPTHTTASPTHTSTSPTHTPTSPSLGSAHPLPQISVWGLATLPLPSHIPWFCILFTEFYRK

SEQ ID NO: 4124 - protein, 493 aa, Homo sapiens
MWSRRQGRLRPTVCGVEELRRRRREREAALRKARREQQLVSKRLLRNDAPEEAGEGCVAAILGETEVQQFLRQAQRGTEEKEREGALVSLRRGLQHPETQQTFIRLEGSMRTLVGLLTSNQALLQLEAARCLHELSHSEQSTVAEACLPATSYLLTYLSSHSSDFIELCLYTLGNLIVESEAVRRQLLPQGIVPALAACIQSPHVAVLEALGYALSQLLQAEEAPEKIIPSILASTLPQHMLQMLQPGPKLNPGVAVEFAWCLHYIICSQVSNPLLIGHGALSTLGLLLLDLAGAVQKTEDAGLELLACPVLRCLSNLLTEAAVETVGGQMQLRDERVVAALFILLQFFFQKQPSLLPEGLWLLNNLTANSPSFCTSLLSLDLIEPLLQLLPVSNVVSVMVLTVLCNVAEKGPAYCQRLWPGPLLPALLHTLAFSDTEVVGQSLELLHLLFLYQPEAVQVFLQQSGLQALERHQEEAQLQDRVYALQQTALQG

SEQ ID NO: 4125 - protein, 613 aa, Homo sapiens
MATIPDWKLQLLARRRQEEASVRGREKAERERLSQMPAWKRGLLERRRAKLGLSPGEPSPVLGTVEAGPPDPDESAVLLEAIGPVHQNRFIRQERQQQQQQQQRSEELLAERKPGPLEARERRPSPGEMRDQSPKGRESREERLSPRETRERRLGIGGAQELSLRPLEARDWRQSPGEVGDRSSRLSEAWKWRLSPGETPERSLRLAESREQSPRRKEVESRLSPGESAYQKLGLTEAHKWRPDSRESQEQSLVQLEATEWRLRSGEERQDYSEECGRKEEWPVPGVAPKETAELSETLTREAQGNSSAGVEAAEQRPVEDGERGMKPTEGWKWTLNSGKAREWTPRDIEAQTQKPEPPESAEKLLESPGVEAGEGEAEKEEAGAQGRPLRALQNCCSVPSPLPPEDAGTGGLRQQEEEAVELQPPPPAPLSPPPPAPTAPQPPGDPLMSRLFYGVKAGPGVGAPRRSGHTFTVNPRRSVPPATPATPTSPATVDAAVPGAGKKRYPTAEEILVLGGYLRLGRSCLAKGSPERHHKQLKISFSETALETTYQYPSESSVLEELGPEPEVPSAPNPPAAQPDDEEDEEELLLLQPELQGGLRTKALIVDESCRR

SEQ ID NO: 4126 - protein, 731 aa, Homo sapiens
MKLRSSHNASKTLNANNMETLIECQSEGDIKEHPLLASCESEDSICQLIEVKKRKKVLSWPFLMRRLSPASDFSGALETDLKASLFDQPLSIICGDSDTLPRPIQDILTILCLKGPSTEGIFRRAANEKARKELKEELNSGDAVDLERLPVHLLAVVFKDFLRSIPRKLLSSDLFEEWMGALEMQDEEDRIEALKQVADKLPRPNLLLLKHLVYVLHLISKNSEVNRMDSSNLAICIGPNMLTLENDQSLSFEAQKDLNNKVKTLVEFLIDNCFEIFGENIPVHSSITSDDSLEHTDSSDVSTLQNDSAYDSNDPDVESNSSSGISSPSRQPQVPMATAAGLDSAGPQDAREVSPEPIVSTVARLKSSLAQPDRRYSEPSMPSSQECLESRVTNQTLTKSEGDFPVPRVGSRLESEEAEDPFPEEVFPAVQGKTKRPVDLKIKNLAPGSVLPRALVLKAFSSSSLDASSDSSPVASPSSPKRNFFSRHQSFTTKTEKGKPSREIKKHSMSFTFAPHKKVLTKNLSAGSGKSQDFTRDHVPRGVRKESQLAGRIVQENGCETHNQTARGFCLRPHALSVDDVFQGADWERPGSPPSYEEAMQGPAARLVASESQTVGSMTVGSMRARMLEAHCLLPPLPPAHHVEDSRHRGSKEPLPGHGLSPLPERWKQSRTVHASGDSLGHVSGPGRPELLPLRTVSESVQRNKRDCLVRRCSQPVFEADQFQYAKESYI

SEQ ID NO: 4127 - protein, 110 aa, Homo sapiens
MCLRGEEMRAVGPWAVMDRPRKAPQVPTPVHMTGNLAPRLQGFSGLKVGLHRGPPLFCPGASLLPASVYGTQAVHAEGAPAGRHQAVLSTPSSASLPCLLAPKVWSRPMG

SEQ ID NO: 4128 - protein, 280 aa, Homo sapiens
MNDRSSRRRTMKDDETFEISIPFDEAPHLDPQIFYSLSPSRRNFEEPPEAASSALALMNSVKTQLHMALERNSWLQKRIEDLEEERDFLRCQLDKFISSARMEAEDHCRMKPGPRRMEGDSRGGAGGEASDPESAASSLSGASEEGSASERRRQKQKGGASRRRFGKPKARERQRVKDADGVLCRYKKILGTFQKLKSMSRAFEHHRVDRNTVALTTPIAELLIVAPEKLAEVGEFDPSKERLLEYSRRCFLALDDETLKKVQALKKSKLLLPITYRFKR

SEQ ID NO: 4129 - protein, 166 aa, Homo sapiens [sequence omitted]

SEQ ID NO: 4130 - protein, 128 aa, Homo sapiens
MVTSPSHHPSHPSRRLVPFAQFIAAQSLPDGFLVLGSSLFLFLKGNALSVCSRESPGSKKDDRSVAAVFLGHESSGDTTTRPARGLYDNLSLPSCLPPALPECPEEMGAESLGLLKPPVPSGSCIALW

SEQ ID NO: 4131 - protein, 213 aa, Homo sapiens
MGSQDGSPLRETRKDPFSAAAAECSCRQDGLTVIVTACLTFATGVTVALVMQIYFGDPQIFQQGAVVTDAARCTSLGIEVLSKQGSSVDAAVAAALCLGIVAPHSSGLGGGGVMLVHDIRRNESHLIDFRESAPGALREETLQRSWETKPGLLVGVPGMVKGLHEAHQLYGRLPWSQVLAFAAAVAQDGFNVTHDLGQWGLGIWERHEVDGEG

SEQ ID NO: 4132 - protein, 297 aa, Homo sapiens
MEETEEKAGEVQEKEASGIQEETTVEPQEVTASMIRLETQITDSQSITSGIFPKTQRGSKSKLSLQLEDAETDELLRDLSTQIEFLDLDQISPEEQQISSPERQPSGELEEKTDRIPQDELGQERRDLEPENREEGQERRVSDIQSKAGISRESLVSSTTEDILFQKDKSTPVYPLTMTWSFGWNSSLPVYYIREERQRVLLYVCAHTAIIYNVFRNNQYHLQVCRDFLPTGGGVVFNVRVVFCFVSQGLTSFYHCRIFPLSLELKASLSLETHGIVYCLSVSNQNQLTKQQLILIL

SEQ ID NO: 4133 - protein, 150 aa, Homo sapiens [sequence omitted]

SEQ ID NO: 4134 - protein, 842 aa, Homo sapiens
MCDFAGKPDCFFAICIVHLPIVMGSRACLCPRLARGYVVWLQLGESAPGQDVRPVLSTQLRSSTWSLPGCWAQSGRFSPCAGPPAAPCPDCPLWGPQIRWKYMIVDEGHRMKNHHCKLTQVLNTHYVAPRRLLLTGTPLQNKLPELWALLNFLLPTIFKSCSTFEQWFNAPFAMTGEKVDLNEEETILIIRRLHKVLRPFLLRRLKKEVEAQLPEKVEYVIKCDMSALQRVLYRHMQAKGVLLTDGSEKDKKGKGGTKTLMNTIMQLRKICNHPYMFQHIEESFSEHLGFTGGIVQGLDLYRASGKFELLDRILPKLRATNHKVLLFCQMTSLMTIMEDYFAYRGFKYLRLDGTTKAEDRGMLLKTFNEPGSEYFIFLLSTRAGGLGLNLQSADTVIIFDSDWNPHQDLQAQDRAHRIGQQNEVRVLRLCTVNSVEEKILAAAKYKLNVDQKVIQAGMFDQKSSSHERRAFLQAILEHEEQDEEEDEVPDDETVNQMIARHEEEFDLFMRMDLDRRREEARNPKRKPRLMEEDELPSWIIKDDAEVERLTCEEEEEKMFGRGSRHRKEVDYSDSLTEKQWLKTLKAIEEGTLEEIEEEVRQKKSSRKRKRDSDAGSSTPTTSTRSRDKDDESKKQKKRGRPPAEKLSPNPPNLTKKMKKIVDAVIKYKDSSSGRQLSEVFIQLPSRKELPEYYELIRKPVDFKKIKERIRNHKYRSLNDLEKDVMLLCQNAQTFNLEGSLIYEDSIVLQSVFTSVRQKIEKEDDSEGEESEEEEEGEEEGSESESRSVKVKIKLGRKEKAQDRLKGGRRRPSRGSRAKPVVSDDDSEEEQEEDRSGSGSEED

SEQ ID NO: 4135 - protein, 819 aa, Homo sapiens
MRWKCRVCLDYDLCTQCYMHNKHELAHAFDRYETAHSRPVTLSPRQGLPRIPLRGIFQGAKVVRGPDWEWGSQDGGEGKPGRVVDIRGWDVETGRSVASVTWADGTTNVYRVGHKGKVDLKCVGEAAGGFYYKDHLPRLGKPAELQRRVSADSQPFQHGDKVKCLLDTDVLREMQEGHGGWNPRMAEFIGQTGTVHRITDRGDVRVQFNHETRWTFHPGALTKALGRVGKVVKVFGDGNLRVAVAGQRWTFSPSCLVAYRPEEDANLDVAERARENKSSLSVALDKLRAQKSDPEHPGRLVVEVALGNAARALDLLRRRPEQVDTKNQGRTALQVAAYLGQVELIRLLLQARAGVDLPDDEGNTALHYAALGNQPEATRVLLSAGCRADAINSTQSTALHVAVQRGFLEVVRALCERGCDVNLPDAHSDTPLHSAISAGTGASGIVEVLTEVPNIDVTATNSQGFTLLHHASLKGHALAVRKILARARQLVDAKKEDGFTALHLAALNNHREVAQILIREGRCDVNVRNRKLQSPLHLAVQQAHVGLVPLLVDAGCSVNAEDEEGDTALHVALQRHQLLPLVADGAGGDPGPLQLLSRLQASGLPGSAELTVGAAVACFLALEGADVSYTNHRGRSPLDLAAEGRVLKALQGCAQRFRERQAGGGAAPGPRQTLGTPNTVTNLHVGAAPGPEAAECLVCSELALLVLFSPCQHRTVCEECARRMKKCIRCQVVVSKKLRPDGSEVASAAPAPGPPRQLVEELQSRYRQMEERITCPICIDSHIRLVFQCGHGACAPCGSALSACPICRQPIRDRIQIFV

SEQ ID NO: 4136 - protein, 171 aa, Homo sapiens [sequence omitted]

SEQ ID NO: 4137 - protein, 141 aa, Homo sapiens [sequence omitted]

SEQ ID NO: 4138 - protein, 129 aa, Homo sapiens [sequence omitted]

SEQ ID NO: 4139 - protein, 114 aa, Homo sapiens
MWSLLCTEETKCSGHPERGYVFSYWDKSGCILANPGKLIDKSKGPRKLLISVSPPPSASSSIPTFYNFIYVTLNKDIEREKASSTYQLQARWTFGAHTPQRPQRSRPPVYECVP

SEQ ID NO: 4140 - protein, 336 aa, Homo sapiens [sequence omitted]

SEQ ID NO: 4141 - protein, 250 aa, Homo sapiens
MTSLVLRGGHPQERSWQNPGVGSDLGAPLLIGRMTQDTTYSDNQPGVLIQVYEGERAMTKDNNLLGRFELSGIPPAPRGVPQIEVTFDIDANGILNVTATDKSTGKANKITITNDKGRLSKEEIERMVQEAEKYKAEDEVQRERVSAKNALESYAFNMKSAVEDEGLKGKISEADKKKVLDKCQEVISWLDANTLAEKDEFEHKRKELEQVCNPIISGLYQGAGGPGPGGFGAQGPKGGSGSGPTIEEVD

SEQ ID NO: 4142 - protein, 102 aa, Homo sapiens
MHMYVYRSTVHDSKDLEPTQMSINDRLDKENVAHIHHGILCHHKKGVHVLCRDMDEAGNHHSQQTNTGREKPNTACSHKWDLNNENTWTQGGEHHTPEPVRG

SEQ ID NO: 4143 - protein, 744 aa, Homo sapiens
MQKEMKMIKDEDVHFDLAVKKTPSFPHCLQPVASRGKAPQRHPFPEALRGPFSQFRYEPPPGDLDGFPGVFEGAGSRKRKSMPTKMPYNHPAEEVTLALHSEENKNHGLPNLPLLFPQPPRPKYDSQMIDLCNVGFQFYRSLEHFGGKPVKQEPIKPSAVWPQPTPTPFLPTPYPYYPKVHPGLMFPFFVPSSSPFPFSRHTFLPKQPPEPLLPRKAEPQESEETKQKVERVDVNVQIDDSYYVDVGGSQKRWQCPTCEKSYTSKYNLVTHILGHSGIKPHACTHCGKLFKQLSHLHTHMLTHQGTRPHKCQVCHKAFTQTSHLKRHMMQHSEVKPHNCRVCGRGFAYPSELKAHEAKHASGRENICVECGLDFPTLAQLKRHLTTHRGPIQYNCSECDKTFQYPSQLQNHMMKHKDIRPYICSECGMEFVQPHHLKQHSLTHKGVKEHKCGICGREFTLLANMKRHVLIHTNIRAYQCHLCYKSFVQKQTLKAHMIVHSDVKPFKCKLCGKEFNRMHNLMGHMHLHSDSKPFKCLYCPSKFTLKGNLTRHMKVKHGVMERGLHSQGLGRGRIALAQTAGVLRSLEQEEPFDLSQKRRAKVPVFQSDGESAQGSHCHEEEEEDNCYEVEPYSPGLAPQSQQLCTPEDLSTKSEHAPEVLEEACKEEKEDASKGEWEKRSKGDLGAEGGQERDCAGRDECLSLRAFQSTRRGPSFSDYLYFKHRDESLKELLERKMEKQAVLLGI

SEQ ID NO: 4144 - protein, 110 aa, Homo sapiens [sequence omitted]

SEQ ID NO: 4145 - protein, 620 aa, Homo sapiens
MGGRPSSPLDKQQRQHLRGQVDTLLRNFLPCYRGQLAASVLRQISRELGPQEPTGSQLLRSKKLPRVREHRGPLTQLRGHPPRWQPIFCVLRGDGRLEWFSHKEEYENGGHCLGSTALTGYTLLTSQREYLRLLDALCPESLGDHTQEEPDSLLEVPVSFPLFLQHPFRRHLCFSAATREAQHAWRLALQGGIRLQGTVLQRSQAPAARAFLDAVRLYRQHQGHFGDDDVTLGSDAEVLTAVLMREQLPALRAQTLPGLRGAGRARAWAWTELLDAVHAAVLAGASAGLCAFQPEKDELLASLEKTIRPDVDQLLRQRARVAGRLRTDIRGPLESCLRREVDPQLPRVVQTLLRTVEASLEAVRTLLAQGMDRLSHRLRQSPSGTRLRREVYSFGEMPWDLALMQTCYREAERSRGRLGQLAAPFGFLGMQSLVFGAQDLAQQLMADAVATFLQLADQCLTTALNCDQAAQRLERVRGRVLKKFKSDSGLAQRRFIRGWGLCIFLPFVLSQLEPGCKKELPEFEGDVLAVGSQALTTEGIYEDVIRGCLLQRIDQELKKTLGANDVSCTLDSCLEVPWEQEGADEETEAEREGGACPRQPDSGAQIQPLCPPPSPGTFRS

SEQ ID NO: 4146 - protein, 323 aa, Homo sapiens
MYSSALIRHQKVHTGERPFYCCECGKFFMDSCTLIIHQRVHTGEKPYECNECGKFFRYRSTLIRHQKVHTGEKPYECSECGKFFMDTSTLIIHQRVHTGEKPYECNKCGKFFRYCFTLNRHQRVHSGERPYECSECGKFFVDSCTLKSHQRVHTGERPFECSICGKSFRCRSTLDTHQRIHTGERPYECSECGKFFRHNSNHIRHRRNHFGERSFECTECGRVFSQNSHLIRHQKVHTRERTYKCSKCGKFFMDSSTLISHERVHTGEKPYECSECGKVFRYNSSLIKHRRIHTGERPYQCSECGRVFNQNSHLIQHQKVHTR

SEQ ID NO: 4147 - protein, 106 aa, Homo sapiens [sequence omitted]

SEQ ID NO: 4148 - protein, 621 aa, Homo sapiens
MLMAGQRGAWTMGDVVEKSLEGPLAPSTDEPSQKTGDLVEILNGEKVKFDDAGLSLILQNGLETLRMENALTDVILCVDIQEFSCHRVVLAAASNYFRAMFCNDLKEKYEKRIIIKGVDAETMHTLLDYTYTSKALITKQNVQRVLEAANLFQFLRMVDACASFLTEALNPENCVGILRLADTHSLDSLKKQVQSYIIQNFVQILNSEEFLDLPVDTLHHILKSDDLYVTEEAQVFETVMSWVRHKPSERLCLLPYVLENVRLPLLDPWYFVETVEADPLIRQCPEVFPLLQEARMYHLSGNEIISERTKPRMHEFQSEVFMIIGGCTKDERFVAEVTCLDPLRRSRLEVAKLPLTEHELESENKKWVEFACVTLKNEVYISGGKETQHDVWKYNSSINKWIQIEYLNIGRWRHKMVVLGGKVYVIGGFDGLQRINNVETYDPFHNCWSEAAPLLVHVSSFAATSHKKKLYVIGGGPNGKLATDKTQCYDPSTNKWSLKAAMPVEAKCINAVSFRDRIYVVGGAMRALYAYSPLEDSWCLVTQLSHERASCGIAPCNNRLYITGGRDEKNEVIATVLCWDPEAQKLTEECVLPRGVSHHGSVTIRKSYTHIRRIVPGAVSV

SEQ ID NO: 4149 - protein, 241 aa, Homo sapiens [sequence omitted]

SEQ ID NO: 4150 - protein, 788 aa, Homo sapiens
MKKASRSVGSVPKVSAISKTQTAEKIKPENSSSASTGGKLVKPGTAASLSKTKSSDDLLAGMAGGVTVTNGVKGKKSTCPSAAPSASAPAMTTVENKSKISTGTASSTKRSTSTGNKESSSTRERLRERTRLNQSKKLPSAGQGANDMALAKRSRSRTATECDVRMSKSKSDNQISDRAALEAKVKDLLTLAKTKDVEIFHLRNELRDMRAQLGINEDHSEGDEKSEKETIMAHQPTDVESTLLQLQEQNTAIREELNQLKNENRMLKDRLNALGFSLEQRLDNSEKLFGYQSLSPEITPGNQSDGGGTLTSSVEGSAPGSVEDLLSQDENTLMDHQHSNSMDNLDSECSEVYQPLTSSDDALDAPSSSESEGIPSIERSRKGSSGNASEVSVACLTERIHQMEENQHSTSEELQATLQELADLQQITQELNSENERLGEEKVILMESLCQQSDKLEHFSRQIEYFRSLLDEHHISYVIDEDVKSGRYMELEQRYMDLAENARFEREQLLGVQQHLSNTLKMAEQDNKEAQEMIGALKERSHHMERIIESEQKGKAALAATLEEYKATVASDQIEMNRLKAQLENGKQKVAELYSIHNSGDKSDIQDLLESVRLDKEKAETLASSLQEDLAHTRNDANRLQDAIAKVEDEYRAFQEEAKKQIEDLNMTLEKLRSNLDEKETERSDMKETIFELEDEVEQHRAVKLHDNLIISDLENTVKKLQDQKHDMEREIKTLHRRLREESAEWRQFQADLQTAVVIANDIKSEAQEEIGDLKRRLHEAQEKNEKL

SEQ ID NO: 4151 - protein, 140 aa, Homo sapiens [sequence omitted]

SEQ ID NO: 4152 - protein, 133 aa, Homo sapiens [sequence omitted]

SEQ ID NO: 4153 - protein, 978 aa, Homo sapiens
MVVLRSSLELHNHSAASATGSLDLSSDFLSLEHIGRRRLRSAGAAQKKPAATTAKAGDGSSVKEVETYHRTRALRSLRKDAQNSSDSSFEKNVEITEQLANGRHFTRQLARQQADKKKEEHREDKVIPVTRSLRARNIVQSTEHLHEDNGDVEVRRSCRIRSRYSGVNQSMLFDKLITNTAEAVLQKMDDMKKMRRQRMRELEDLGVFNETEESNLNMYTRGKQKDIQRTDEETTDNQEGSVESSEEGEDQEHEDDGEDEDDEDDDDDDDDDDDDDDEDDEDEEDGEEENQKRYYLRQRKATVYYQAPLEKPRHQRKPNIFYSGPASPARPRYRLSSAGPRSPYCKRMNRRRHAIHSSDSTSSSSSEDEQHFERRRKRSRNRAINRCLPLNFRKDELKGIYKDRMKIGASLADVDPMQLDSSVRFDSVGGLSNHIAALKEMVVFPLLYPEVFEKFKIQPPRGCLFYGPPGTGKTLVARALANECSQGDKRVAFFMRKGADCLSKWVGESERQLRLLFDQAYQMRPSIIFFDEIDGLAPVRSSRQDQIHSSIVSTLLALMDGLDSRGEIVVIGATNRLDSIDPALRRPGRFDREFLFSLPDKEARKEILKIHTRDWNPKPLDTFLEELAENCVGYCGADIKSICAEAALCALRRRYPQIYTTSEKLQLDLSSINISAKDFEVAMQKMIPASQRAVTSPGQALSTVVKPLLQNTVDKILEALQRVFPHAEFRTNKTLDSDISCPLLESDLAYSDDDVPSVYENGLSQKSSHKAKDNFNFLHLNRNACYQPMSFRPRILIVGEPGFGQGSHLAPAVIHALEKFTVYTLDIPVLFGVSTTSPEETCAQVIREAKRTAPSIVYVPHIHVWWEIVGPTLKATFTTLLQNIPSFAPVLLLATSDKPHSALPEEVQELFIRDYGEIFNVQLPDKEERTKFFEDLILKQAAKPPISKKKAVLQALEVLPVAPPPEPRSLTAEEVKRL

SEQ ID NO: 4154 - protein, 128 aa, Homo sapiens [sequence omitted]

SEQ ID NO: 4155 - protein, 160 aa, Homo sapiens [sequence omitted]

SEQ ID NO: 4156 - protein, 138 aa, Homo sapiens
MGELAEGEHEAGSWGKRRGHGEEMGGISEMTRWRGGRRGMGVAPAGPAMLGVSFPLHLCPPAPLLSLTLLSPFSLPTLFLPHFPPRVPLLRVSLSVSEYHRPAKPPPPPTGQEKIGGQEAAAPWCTCPRGRKRNFSDT

SEQ ID NO: 4157 - protein, 145 aa, Homo sapiens
MKEKLSKKRAEVKGNRSWLEEFLKPSDNEEGPPPKNKVLSNNASSQKPTHSSCIPLLRLPDKQQKVNESIKTDMLCTDKEEECPAASLLQKYTNNSEKPSGKRQCKTKHLISQDLRQGFLLTGKCYVENADGKIPLGTCFLLGLI

SEQ ID NO: 4158 - protein, 384 aa, Homo sapiens
MKQAGFPLGILLLFWVSYVTDFSLVLLIKGGALSGTDTYQSLVNKTFGFPGYLLLSVLQFLYPFIVDPENVFIGRHFIIGLSTVTFTLPLSLYRNIAKLGKVSLISTGLTTLILGIVMARAISLGPHIPKTEDAWVFAKPNAIQAVGVMSFAFICHHNSFLVYSSLEEPTVAKWSRLIHMSIVISVFICIFFATCGYLTFTGFTQGDLFENYCRNDDLVTFGRFCYGVTVILTYPMECFVTREVIANVFFGGNLSSVFHIVVTVMVITVATLVSLLIDCLGIVLELNGVLCATPLIFIIPSACYLKLSEEPRTHSDKIMSCVMLPIGAVVMVFGFVMAITNTQDCTHGQEMFYCFPDNFSLTNTSESHVQQTTQLSTLNISIFQ

SEQ ID NO: 4159 - protein, 372 aa, Homo sapiens
MDKFLDTYTLPRLNQEEVESLNRPITGAEIVAIINSLPTKKSPGPDGFTAEFYQRYKEELVPFLLKLFQSTEKEGILPNSFYEDSIILIPKPGRDTTKKDNFRPISLMNIDAKILNKILAKRIQQHIKKLIHHDQVGFIPGMQGWFNIGKSINVIQHINRAKDKNHMIISIDAEKAFDKIQQPFMLKTLNKLGIDGTYFKIIRAIYDKPTANIILNGQKLEAFPLKTGTRQGCPLSPLLFNIVLEVLARAIRQEKEIKGIQLGKEEVKLSLFADDMIVYLENPIVSAQNLLKLISNFSKVSGYKINVQKSQAFLYTNNRQTESQIMSELPFTIASKRIKYLGIQLTRDVKDLFKENWSFFLLVGFVVSVAQE

SEQ ID NO: 4160 - protein, 185 aa, Homo sapiens
MGKRRHRRGNVISCVTNSGKTTLAKNLQKHLPNCSVISQDDFFKPESEIETDKNGFLQYDVLEALNMEKMMSAISCWMESARHSVVSTDQESAEEIPILIIEGFLLFNYKPLDTIWNRSYFLTIPYEECKRRRSTRVYQPPDSPGYFDGHVWPMYLKYRQEMQDITWEVVYLDGTKSEEDLFLQV

SEQ ID NO: 4161 - protein, 804 aa, Homo sapiens
METQKDEAAQAKGAAASGSTREQTAEKGAKNKAAEATEGPTSEPSSSGPGRLKKTAMKLFGGKKGICTLPSFFGGGRSKGSGKGSSKKGLSKSKTHDGLSEAAHGPEDVVSEGTGFSLPLPELPCQFPSSQSAHGALETGSRCKTSVAGATEKAVAEKFPSMPKPKKGLKGFFSSIRRHRKSKVTGAEQSEPGAKGPERVRARPHEHVSSAPQVPCFEETFQAPRKENANPQDAPGPKVSPTPEPSPPATEKMACKDPEKPMEACASAHVQPKPAPEASSLEEPHSPETGEKVVAGEVNPPNGPVGDPLSLLFGDVTSLKSFDSLTGCGDIIAEQDMDSMTDSMASGGQRANRDGTKRSSCLVTYQGGGEEMALPDDDDEEEEEEEEVELEEEEEEVKEEEEDDDLEYLWETAQMYPRPNMNLGYHPTTSPGHHGYMLLDPVRSYPGLAPGELLTPQSDQQESAPNSDEGYYDSTTPGFEDDSGEALGLVRRDCLPRDSYSGDALYEFYEPDDSLENSPPGDDCLYDLHGRSSEMFDPFLNFEPFLSSRPPGAMETEEERLVTIQKQLLYWELRREQLEAQEARAREAHAREAHAREAYTREAYGREAYAREAHTWEAHGREARTREAQAREVRCRETQVRETQARQEKPVLEYQMRPLGPSVMGLAAGVSGTSQISHRGITSAFPTTASSEPDWRDFRPLEKRYEGTCSKKDQSTCLMQLFQSDAMFEPDMQEANFGGSPRRAYPTYSPPEDPEEEEVEKEGNATVSFSQALVEFTSNGNLFSSRRCPGTEDKRQVTQACGTW

SEQ ID NO: 4162 - protein, 522 aa, Homo sapiens
MQPWHGKAMQRASEAGATAPKASARNARGAPMDPNESPAAPEAALPKAGKFGPARKSGSRQKKSAPDTQERPPVRATGARAKKAPQRAQDTQPSDATSAPGAEGLEPPAAREPALSRAGSCRQRGARCSTKPRPPPGPWDVPSPGLPVSAPILVRRDAAPGASKLRAVLEKLKLSRDDISTAAGMVKGVVDHLLLRLKCDSAFRGVGLLNTGSYYEHVKISAPNEFDVMFKLEVPRIQLEEYSNTRAYYFVKFKRNPKENPLSQFLEGEILSASKMLSKFRKIIKEEINDIKDTDVIMKRKRGGSPAVTLLISEKISVDITLALESKSSWPASTQEGLRIQNWLSAKVRKQLRLKPFYLVPKHAKEGNGFQEETWRLSFSHIEKEILNNHGKSKTCCENKEEKCCRKDCLKLMKYLLEQLKERFKDKKHLDKFSSYHVKTAFFHVCTQNPQDSQWDRKDLGLCFDNCVTYFLQCLRTEKLENYFIPEFNLFSSNLIDKRSKEFLTKQIEYERNNEFPVFDEF

SEQ ID NO: 4163 - protein, 116 aa, Homo sapiens
MTTLLENSSGKANPLRAVGILRQLCFPNRGRIQPGISFLDPTAETPAGPSPENCPGRGVRSQRPPLRGPRRSSGARPQRSKPSILGSSPGPSQRHIDLEVALDSPTRGCLVAPGSA

SEQ ID NO: 4164 - protein, 585 aa, Homo sapiens [sequence omitted]

SEQ ID NO: 4165 - protein, 102 aa, Homo sapiens
MTWGLALCPAPRFLLVLCLLDSFPFQGPQPLPTQSLFWLRPRLHSLQLRAFLSAESTGKLGGVRLDGIFQKQHDSFRPLLPAKKVKKSHHCNKKRALCLTWQ

SEQ ID NO: 4166 - protein, 100 aa, Homo sapiens
MRLSFLHVHGLIAHFFLLLNNIPLWITLFIHSPIEGHLGCFQFGAIMNEAAINITCRLFCRHKFSTHCGSFPFEVCNFFFTVNSFSVRVIFHGNSVYPKL

SEQ ID NO: 4167 - protein, 231 aa, Homo sapiens [sequence omitted]

SEQ ID NO: 4168 - protein, 132 aa, Homo sapiens
MDLPYYHGRLTKQDCETLLLKEGVDGNFLLRDSESIPGVLCLCVSFKNIVYTYRIFREKHGYYRIQTAEGSPKQVFPSLKELISKFEKPNQGMVVHLLKPIKRTSPSLRWRGLKLELETFVNSNSDYVDVLP

SEQ ID NO: 4169 - protein, 153 aa, Homo sapiens [sequence omitted]

SEQ ID NO: 4170 - protein, 245 aa, Homo sapiens
MTIISVTLEIHHHITERDADRSLTILDEQLYSFAFSTVHITKKRNGGGSLNNYSSSIPLTPSTSQEDLYFSVPPTANTPTPVCKQSMGWSNLFTSEKGSDPDKGRKALESHADTIGSGRAIPIKQGMLLKRSGKWLKTWKKKYVTLCSNGVLTYYSSLGDYMKNIHKKEIDLRTSTIKVPGKWPSLATSACAPISSSKSNGLSKDMEALHMSANSDIGLGDSICFSPSISSTTSPKLNLPPSPHA

SEQ ID NO: 4171 - protein, 166 aa, Homo sapiens [sequence omitted]

SEQ ID NO: 4172 - protein, 194 aa, Homo sapiens
MYMILEIVMNDCLGILKNTPRFDDLLRRLRSQHSVILNSYDLLQQKNTKQIVKGKKPKFRENQAQSSESCFSEVTGCALFKFHLVLMTTHAICPLGSLLETQCQGFYWACFLAHPTILDFQKVSRGSAFQLKTLSPFQLGGKKGTEKQGTELLLFWVGGAVVSLPKSKVPHSSKGEPCKLKRIAVSNLLFYTVT

SEQ ID NO: 4173 - protein, 584 aa, Homo sapiens
MARDTFKKLTKKEWISSMITTCLEDDLLRALPCHSPHQEALSVFLLLPECPVMHDSKNWKNLVVPFAKAVCEMSKQSLQVLKKCWAFLQESSLNPLIQMLKAAIISQLLHQTKTEQDHCNVKALLGMMKELHKVNKANCRLPENTFNINELSNLLNFYIDRGRQLFRDNHLIPAETPSPVIFSDFPFIFNSLSKIKLLQADSHIKMQMSEKKAYMLMHETILQKKDEFPPSPRFILRVRRSRLVKDALRQLSQAEATDFCKVLVVEFINEICPESGGVSSEFFHCMFEEMTKPEYGMFMYPEMGSCMWFPAKPKPEKKRYFLFGMLCGLSLFNLNVANLPFPLALYKKLLDQKPSLEDLKELSPRLGKSLQEVLDDAADDIGDALCIRFSIHWDQNDVDLIPNGISIPVDQTNKRDYVSKYIDYIFNVSVKAVYEEFQRGFYRVCEKEILRHFYPEELMTAIIGNTDYDWKQFEQNSKYEQGYQKSHPTIQLFWKAFHKLTLDEKKKFLFFLTGRDRLHARGIQKMEIVFRCPETFSERDHPTSITCHNILSLPKYSTMERMEEALQVAINNNRGFVSPMLTQS

SEQ ID NO: 4174 - protein, 436 aa, Homo sapiens
MDSVAFEDVAVNFTQEEWALLSPSQKNLYRDVTLETFRNLASVGIQWKDQDIENLYQNLGIKLRSLVERLCGRKEGNEHRETFSQIPDCHLNKKSQTGVKPCKCSVCGKVFLRHSFLDRHMRAHAGHKRSECGGEWRETPRKQKQHGKASISPSSGARRTVTPTRKRPYECKVCGKAFNSPNLFQIHQRTHTGKRSYKCREIVRALTVSSFFRKHGKMHTGEKRYECKYCGKPIDYPSLFQIHVRTHTGEKPYKCKQCGKAFISAGYLRTHEIRSHALEKSHQCQECGKKLSCSSSLHRHERTHSGGKLYECQKCAKVFRCPTSLQAHERAHTGERPYECNKCGKTFNYPSCFRRHKKTHSGEKPYECTRCGKAFGWCSSLRRHEMTHTGEKPFDCKQCGKVFTFSNYLRLHERTHLAGRSQCFGRRQGDHLSPGV

SEQ ID NO: 4175 - protein, 255 aa, Homo sapiens
MRRKKSTRGDQAPGHDREAEAAVKEKEEGPEPRLTIDEAPQERLRETEGPDFPSPSVPLKASDPEEASQAQEDPGQGDQQVCAEEADPELEPASGGEQEPRPQQAQVGGSGPWLLSTSGADSGRGALLPRAASRPRPRALGAGVGKEGAPRHLPPLQTKAASQILENGEEAPGPDPSLDRMLSSSSSVSSLNSSTVRREGGDPGGRGVDPFRCVAPACPSLAAGPTAAAPQPATYDPGLKPPRCPRPRREPCERP

SEQ ID NO: 4176 - protein, 112 aa, Homo sapiens
MLCKPELPGGSCSVRPTAPCLEKPCYLGPSCWASGHSSTLKGKQKGRSAQSRRNRCGLHPRLGLREGRECRIRISLPAGSISPGMCWDPLVTGEKGSSHEWFVVLGPCCHHL

SEQ ID NO: 4177 - protein, 567 aa, Homo sapiens [sequence omitted]

SEQ ID NO: 4178 - protein, 768 aa, Homo sapiens [sequence omitted]

SEQ ID NO: 4179 - protein, 549 aa, Homo sapiens
MAVPPRGRGIDPARTNPDTFPPSGARCMEPSPERPACSQQEPTLGMDAMASEHRDVLVLLPSREQLRLAVGVKATGRELFQQVCNVASIRDAQFFGLCVVRNNEYIFMDLEQKLSKYFSKDWKKERNEGNEKPRAPFVAFLRVQHYVENGRVISDHRARHLYYCHLKERVLRSQCAHREEAYFLLAACALQADLGEHRESAHAGRYFEPHSYFPQWIITKRGIDYILRHMPTLHRERQGLSPKEAMLCFIQEACRLEDVPVHFFRLHKDKKEGRPTVILGLALRGVHIYQGKKLEIQLDGLPAAQKLVYYTGCTWRSRHLLHLLRASHQLHLRVRPTLQQLRQREEAEEKQHYRESYISDELELDLASRSFPGSGVSSQHCPHCLSRHSADSHGSSYTSGIKANSWLRESREMSVDVPLEVHGLHEKEPSSSPRTSRSHPSTRGDSQATRQEPCTEVRTRGQSAEAVHQIQEMTAGVSEEQHSHGLDDMQLHQLALHPAPTSLSHTFHRALDCRLAGPCETRATLPSKRSSNCLALDLFGEAPPQEFVV

SEQ ID NO: 4180 - protein, 155 aa, Homo sapiens [sequence omitted]

SEQ ID NO: 4181 - protein, 114 aa, Homo sapiens
MSTIKYPIFPLDLLLLPFSRSELVLPLFSHLATILDFSFSFTSFPTSVDCQVMPDWLGKYFLTQFLLFPTITTLVCIIHMDYCDGLGTGFHESSCIPSNPSSINCLDELSKTQP

SEQ ID NO: 4182 - protein, 100 aa, Homo sapiens
MKQSQIKAKQTHGDFETEKRKTEDIHVRWFQVSLRRRSYLQKVRLVRWEFKNNKVCSYHCEEDHGKWTNQNERLSEQEGVSLHKLPPACCHVRPAFCLPP

SEQ ID NO: 4183 - protein, 244 aa, Homo sapiens
MRWCLLLIWAQGLRQAPLASGMMTGTIETTGNISAEKGGSIILQCHLSSTTAQVTQVNWEQQDQLLAICNADLGWHISPSFKDRVAPGPGLGLTLQSLTVNDTGEYFCIYHTYPDGAYTGRIFLEVLESSVAEHGARFQIPLLGAMAATLVVICTAVIVVVALTRKKKALRIHSVEGDLRRKSAGQEEWSPSAPSPPGSCVQAEAAPAGLCGEQRGEDCAELHDYFNVLSYRSLGNCSFFTETG

SEQ ID NO: 4184 - protein, 129 aa, Homo sapiens
MLPFYLMYWFPEIAVMTYHKLGGLTQQKHILSQFWRPEVQSQYHRAEWKQSAGSAPLQASRRERVSHFFQLLGLLAFLGLGRPSPVSASVLTLTLLLFVPSQFCRCQISVCFPLIKICVTAFRAQPNPG

SEQ ID NO: 4185 - protein, 109 aa, Homo sapiens
MLPVSTRDPGLLFPSGPKPAHRICLDHFPVYIILKMNNTASFHTHPLEGWEWRRCLGVQAGMSTFVCARPLTMWDGARDRKRQYSDIWCVNPKNLRQVSDNLESLFCQG

SEQ ID NO: 4186 - protein, 187 aa, Homo sapiens [sequence omitted]

SEQ ID NO: 4187 - protein, 121 aa, Homo sapiens [sequence omitted]

SEQ ID NO: 4188 - protein, 110 aa, Homo sapiens [sequence omitted]

SEQ ID NO: 4189 - protein, 453 aa, Homo sapiens [sequence omitted]

SEQ ID NO: 4190 - protein, 695 aa, Homo sapiens
MIMKSNFDETYIENVVRNILKGQDVDSKEAQLISFLALLSSYVTDSTISVSQCEIFLGIIYTSTPWEPESLEDKMGTYSTLLIKTEVAEYGRYTGVRIIHPLIALYCLKELERSYHLDKCQIALNILEENLFYDSGIGRDKFQHDVQTLLLTRQRKVYGDETDTLFSPLMEALQNKDIEKVLSAGSRRFPQNAFICQALARHFYIKEKDFNTALDWARQAKMKAPKNSYISDTLGQVYKSEIKWWLDGNKNCRSITVNDLTHLLEAAEKASRAFKESQRQTDSKNYETENWSPQKSQRRYDMYNTACFLGEIEVGLYTIQILQLTPFFHKENELSKKHMVQFLSGKWTIPPDPRNECYLALSKFTSHLKNLQSDLKRCFDFFIDYMVLLKMRYTQKEIAEIMLSKKVSRCFRKYTELFCHLDPCLLQSKESQLLQEENCRKKLEALRADRFAGLLEYLNPNYKDATTMESIVNEYAFLLQQNSKKPMTNEKQNSILANIILSCLKPNSKLIQPLTTLKKQLREVLQFVGLSHQYPGPYFLACLLFWPENQELDQDSKLIEKYVSSLNRSFRGQYKRMCRSKQASTLFYLGKRKGLNSIVHKAKIEQYFDKAQNTNSLWHSGDVWKKNEVKDLLRRLTGQAEGKLISVEYGTEEKIKIPVISVYSGPLRSGRNIERVSFYLGFSIEGPLAYDIEVI

SEQ ID NO: 4191 - protein, 470 aa, Homo sapiens
MELGLCWVFLVAILEGVQCEVRLEESGGDFVQPGGSLRLSCAVSGFAFSRYEISWVRQAPGKGPEWISYMTSDDYTIYYADSVKGRFSMSRDAATRSVFLQMDSLRVDDTAVYYCARGGHTTRNKGGDYWGRGTLVIVSSASTKGPSVFPLAPSSKSTSGGTAALGCLVKDYFPEPVTVSWNSGALTSGVHTFPAVLQSSGLYSLSSVVTVPSSSLGTQTYICNVNHKPSNTKVDKRVEPKSCDKTHTCPPCPAPELLGGPSVFLFPPKPKDTLMISRTPEVTCVVVDVSHEDPEVKFNWYVDGVEVHNAKTKPREEQYNSTYRVVSVLTVLHQDWLNGKEYKCKVSNKALPAPIEKTISKAKGQPREPQVYTLPPSREEMTKNQVSLTCLVKGFYPSDIAVEWESNGQPENNYKTTPPVLDSDGSFFLHSKLTVDKSRWQQGNVFSCSVMHEALHNHYTQKSLSLSPGK

SEQ ID NO: 4192 - protein, 226 aa, Homo sapiens [sequence omitted]

SEQ ID NO: 4193 - protein, 115 aa, Homo sapiens [sequence omitted]

SEQ ID NO: 4194 - protein, 138 aa, Homo sapiens
MPPSEPCLLLLLFLFLSWSFTLVAQTGVQWRNLGSLQPPPPGFKRFSCLGLPSSWDYRHHHAWLIFVLLAEMGFCHVGQAGLELLTSSEPPASASQSAGITGMSHHTWPALPFLFVKMRIIILVYQENDREAPGKHSM

SEQ ID NO: 4195 - protein, 806 aa, Homo sapiens [sequence omitted]

SEQ ID NO: 4196 - protein, 304 aa, Homo sapiens
MKQGKYRHFFEACRLLQQMIDIAIDGFLLTPVQKICKYPLQLAELLKYTTQEHGDYSNIKAAYEAMKNVACLINERKRKLESIDKIARWQVSIVGWEGLDILDRSSELIHSGELTKITKQGKSQQRTFFLFDHQLVSCKKDLLRRDMLYYKGRLDMDEMELVDLGDGRDKDCNLSVKNAFKLVSRTTDEVYLFCAKKQEDKARWLQACADERRRVQEDKEMGMEISENQKKLAMLNAQKAGHGKSKGYNRCPVAPPHQGLHPIHQRHITMPTSVPQQQVFGLAEPKRKSSLFWHTFNRLTPFRK

SEQ ID NO: 4197 - protein, 276 aa, Homo sapiens [sequence omitted]

SEQ ID NO: 4198 - protein, 743 aa, Homo sapiens
MLAQPFQPTEVSPSPTYPSQAIREYPTLAQPFQPTEVSPSPAHPYQLTEVSPSAAYSYQPTEVSPNPGYLSMAIEMSLSPEYPSVATEVSPSPTYPYQPTEISPSSGYLSVATGVSPSPGYPSQLTEVSPSSGYLSVATEVSPSPDYSSQPTEMSPSPGYPFQPTEVSPSPDYPCVATGESPSLAQPSQPTEVSPSSAYPSVVTGESPSLAQSYQRTEVFPSPAYPFMATEVSPSPGDPSVVTGESPSPAYPSQPTEMSPSPAYPSQPTGESPSLTQPSLTIRVSPSLAMSSQTIGVSPSLAMPSQTIGVSPSLAMPFHTIGVSPTLAHPSMAIRESPSLAQPPQSTGESPSLTWPSQATGVSPSVAHQSVASRVSSSLAQPSQASGMSPRQDYPPVASRVSPNQAHASITSRMSPSRAHASMTCMVSPSQVHRSMPSEVSPSLAQLSQATTAVPLRPAHQPMACGVSPSLAQPSQATGMSSRLAHQPMTCVVSLSPAQPSQAIGVSPSLAHPSGPHGLSPSLAHPYVASGAGSSLAHPSQTTAVSPRQAQPSVASSPGKTDSSCTLASSLAEPAIAPSLFPPSVAHTEALSLAQSPPDTRLAPSRSQPSVVSGTCHGLNEPCWGSRLDSNLQCSRVDSVAPCLCHPSAFVSVSLGGPYPSVAGNMDQGLNQPSLGTGVNLCEEPLMVSEMVSSPPDFKFNDVSLGFHHPPRVGGRHVCPPSVVSVSTPNLSHADEEACCVGQ

SEQ ID NO: 4199 - protein, 134 aa, Homo sapiens
MLSIFSGAYWPFFREMSIQVLSLLFNLFVLHCRNSLYLLDINSLSDTRLANVFFHSMCCLFILLIVSFDAQKFFILMKSKLSVFPFTVCFSPLFSPMSFIVLALMVSSLIHFELRFGLCKLTVQLFFFFWHVSM

SEQ ID NO: 4200 - protein, 120 aa, Homo sapiens
MMVAKWWFSIFIISSTFLSWHSNGRKKFLFSAIYVLVYLFISLCPWISVLFNGLKFVTLTIYFYAQIAPYLTDRSMSPLFSEHFLSGAGCSRLIMYFLCPNSGINYFPKNPCFLLVEDDI

SEQ ID NO: 4201 - protein, 516 aa, Homo sapiens
MPNVLLPPKESNLFKRILKCYEQKQYKNGLKFCKMILSNPKFAEHGETLAMKGLTLNCLGKKEEAYEFVRKGLRNDVKSHVCWHVYGLLQRSDKKYDEAIKCYRNALKLDKDNLQILRDLSLLQIQMRDLEGYRETRYQLLQLRPTQRASWIGYAIAYHLLKDYDMALKLLEEFRQTQQVPPNKIDYEYSELILYQNQVMREADLLQESLEHIEMYEKQICDKLLVEEIKGEILLKLGRLKEASEVFKNLIDRNAENWCYYEGLEKALQISTLEERLQIYEEISKQHPKAITPRRLPLTLVPGERFRELMDKFLRVNFSKGCPPLFTTLKSLYYNTEKVSIIQELVTNYEASLKTCDFFSPYENGEKEPPTTLLWVQYFLAQHFDKLGQYSLALDYINAAIASTPTLIELFYMKAKIYKHIGNLKEAAKWMDEAQSLDTADRFINSKCAKYMLRANMIKEAEEMCSKFTREGTSAMENLNEMQCMWFQTECISAYQRLGRYGDALKKCHEVERVSC

SEQ ID NO: 4202 - protein, 109 aa, Homo sapiens
MTTVDPREKLEVLERTYGEIEGTVSRVLGREYKLPMDDLLPLLIYVVSRARIQHLGAEIHLIRDMMDPNHTGGLYDFLLTALESCYEHIQKEDMRLHRLPGHWHSRELW

SEQ ID NO: 4203 - protein, 131 aa, Homo sapiens [sequence omitted]

SEQ ID NO: 4204 - protein, 342 aa, Homo sapiens [sequence omitted]

SEQ ID NO: 4205 - protein, 616 aa, Homo sapiens
MVLSPFNFEDWNSESIIYYMVTSPKLLSWIKNESLLKSLQPFAKWHYIERDLAMFNINIDDDYVPCLQGITRASFCNVYVEWIQHCARKRQEPSTTLDSDEDSPLVTLSFALCTLGRRALGTAAHNMAISLDSFLYGLHVLFKGDFRITARDEWVFADMDLLHKVVAPAIRMSLKLHQDQFTCPDEYEDPAVLYEAIQSFEKKVVICHEGDPAWRGAVLSNKEELLTLRHVVDEGADEYKVIVLHRSFLSFKVIKVNKECVRGLWAGQQQELIFLRNRNPERGSIQNNKQVLRNLINSSCDQPLGYPMYVSPLTTSYLGTHRQLKNIWGGPITLDRIRTWFWTKWVRMRKDCNARQHSGGNIEDVDGGGAPTTGGNNAPSGGSQESSAEQPRKGGAQHGVSSCEGTQRTGRRKGRSQSVQAHSALSQRPPMLSSSGPILESRQTFLQTSSSVHELAQRLSGSRLSLHASATSLHSQPPPVTTTGHLSVRERAEALIRSSLGSSTSSTLSFLFGKRSFSSALVISGLSAAEGGNTSDTQSSSSVNIVMGPSARAASQATRHLSEPCEPPDATEQGQLHDRCLAEAVADTLGVVCRRASQEDMGLDDTASQQSVSDEQ

SEQ ID NO: 4206 - protein, 180 aa, Homo sapiens
MGGRRSPRAHSCPTPLNPQLQSEELGLRAPQWVRDKMVTMCMRCQEPFNALTRRRHHCRACGYVVCARCSDYRAELKYDDNRPNRVCLHCYAFLTGNVLPEAKEDKRRGILEKGSSATPDQSLMCSFLQLIGDKWGKSGPRGWCVIPRDDPLVLYVYAAPQVRPPPARPPSGPGLPTACV

SEQ ID NO: 4207 - protein, 299 aa, Homo sapiens [sequence omitted]

SEQ ID NO: 4208 - protein, 124 aa, Homo sapiens [sequence omitted]

SEQ ID NO: 4209 - protein, 326 aa, Homo sapiens
MDIDKDLEAPLYLTPEGWSLFLQRYYQVVHEGAELRHLDTQVQRCEDILQQLQAVVPQIDMEGDRNIWIVKPGAKSRGRGIMCMDHLEEMLKLVNGNPVVMKDGKWVVQKYIERPLLIFGTKFDLRQWFLVTDWNPLTVWFYRDSYIRFSTQPFSLKNLDNSVHLCNNSIQKHLENSCHRHPLLPPDNMWSSQRFQAHLQEMGAPNAWSTIIVPGMKDAVIHALQTSQDTVQCRKASFELYGADFVFGVDFQPWLIEINASPTMAPSTAVTARLCAGVQADTLRVVIDRRLDRNCDTGAFELIYKQGPAPNMQVSPERNAPLCPAP

SEQ ID NO: 4210 - protein, 100 aa, Homo sapiens [sequence omitted]

SEQ ID NO: 4211 - protein, 130 aa, Homo sapiens
MHRFCLQKPSVPASEPEGSKQKRSRPRRGTSERSSKPLSALTYGIPDALFLFCREKVVQPLNGAGTSQFGGKEEAYSSKEYETGKNPRISQKPLQSEVLFQADKCPAGWTSDSLLGTELCPPKRESHPGV

SEQ ID NO: 4212 - protein, 299 aa, Homo sapiens
MPYTTYLVEKGASHSFVAEAKPPTVTMPRIKALMTGSLPGFVDVIRNLNSPALLEDSVIRQAKAAGKRIVFYGDETWVKLFPKHFVEYDGTTSFFVSDYTEVDNNVTRHLDKVLKRGDWDILILHYLGLDHIGHISGPNSPLIGQKLSEMDSVLMKIHTSLQSKERETPLPNLLVLCGDHGMSETGSHGASSTEEVNTPLILISSAFERKPGDIRHPKHVQQTDVAATLAIALGLPIPKDSVGSLLFPVVEGRPMREQLRFLHLNTVQLSKLLQENVPSYEKGSHPAPAQRPTGTAQKG

SEQ ID NO: 4213 - protein, 115 aa, Homo sapiens
MPHLWSSAVPPWLQHLGLTVLSVALIVPGAETPIDLSYHPKHPGTSAWLNSHPHWERSAWGCPGQGLRGSWLKWLKTCAHGCACLCSCLGGQSLPWAKRERVCVCVCVHEESLGS

SEQ ID NO: 4214 - protein, 304 aa, Homo sapiens
MNNQKVVAVLLQECKQVLDQLLLEAPDVSEEDKSEDQRCRALLPSELRTLIQEAKEMKWPFVPEKWQYKQAVGPEDKTNLKDVIGAGLQQLLASLRASILARDCAAAAAIVFLVDRFLYGLDVSGKLLQVAKGLHKLQPATPIAPQVVIRQARISVNSGKLLKAEYILSSLISNNGATGTWLYRNESDKVLVQSVCIQIRGQILQKLGMWYEAAELIWASIVGYLALPQPDKKGLSTSLGILADIFVSMSKNDYEKFKNNPQINLSLLKEFDHHLLSAAEACKLAAAFSAYTPLFVLTAVVLFC

SEQ ID NO: 4215 - protein, 283 aa, Homo sapiens
MKMILAWRLPLIYPHVSLFIPQLSGQTNIHLSKNFFLTNRARERSDTFINLREVLNRFKLPPGEYILVPSTFEPNKDGDFCIRVFSEKKADYQAVDDEIEANLEEFDISEDDIDDGFRRLFAQLAGEDAEISAFELQTILRRVLAKRQDIKSDGFSIETCKIMVDMLDSDGSGKLGLKEFYILWTKIQKYQKIYREIDVDRSGTMNSYEMRKALEEAGFKMPCQLHQVIVARFADDQLIIDFDNFVRCLVRLETLFKIFKQLDPENTGTIELDLISWLCFSVL

SEQ ID NO: 4216 - protein, 590 aa, Homo sapiens [sequence omitted]

SEQ ID NO: 4217 - protein, 107 aa, Homo sapiens [sequence omitted]

SEQ ID NO: 4218 - protein, 119 aa, Homo sapiens [sequence omitted]

SEQ ID NO: 4219 - protein, 100 aa, Homo sapiens
MVKMTRSKTFQAYLPSCHRTYSCIHCRAHLANHDELISKVHISSRPSLPTPGRALSAPEVAEVYKLSRIFVLHLCTGRADPRDRLTQLRKTLSWRDRVVI

SEQ ID NO: 4220 - protein, 228 aa, Homo sapiens [sequence omitted]

SEQ ID NO: 4221 - protein, 175 aa, Homo sapiens
MLPPAPELKTGSPPPGLQLSLDGGTGSGQKGKCEEFPSSLSSVSPGLEAAALLLAVTMDPLETPIKDGILYQQHVKFGKVGTPGCQAAAKDQQWVENAASAPASDSPGRPGRLGKGVRVEDPTQVWGVEWSAGVSLRRQGLSRLCQTLPPGEMGNTGVGEGRRLKPPSREELHSL

SEQ ID NO: 4222 - protein, 128 aa, Homo sapiens [sequence omitted]

SEQ ID NO: 4223 - protein, 129 aa, Homo sapiens
MSQICRGSRNIAQWNQWGAWATPQPLVCPIAAPWAPLGTPRPLRSLVWKALECWTKFPLWLPERGSSSPSLRARGARPLGASRPWSQTSGVLATPFPGYVSLGKLPNPSEPPFTIYRMEETLMSPWKVF

SEQ ID NO: 4224 - protein, 119 aa, Homo sapiens [sequence omitted]

SEQ ID NO: 4225 - protein, 194 aa, Homo sapiens
MREGWEVRPGRWRRARVSADGMGCFPAPFPSPHTQAVMDVGSSSPAAQRPPQSFSLASPLLPVPAEILQANDNLTQVINLYKQLVRGEEVNGDATAGSIPGSTSALLDLSGLDLPPAGTTYPAMPTRPGEQASPEQPSASVSLLDDELTSLGEEGARPGGGRAQQQMGHDPRAHSQLAEPRAPGVDPVGHVDEH

SEQ ID NO: 4226 - protein, 231 aa, Homo sapiens
MAVRLIPAVHLGDGVFLVAPPPPPLPSAPLLELPEGLRAEALWGVNTARQEQKLLSWLQERAAPGACYLKCLQLLKALRDLGARGLDSAAATQWGRILSSYVLKTVLLAVLLRKGAPGQGWDEEHLGRCLEELVQFLRDCLLRRHTLFHCVLGPGGAAAEVGPLPKALREAAPVDLLAAFDGHARELAAARLLSTWQRLPQLLRAYGGPRYLARCPPPRSQRAQGFLEGEP

SEQ ID NO: 4227 - protein, 851 aa, Homo sapiens
MVDIPPPFDLACITKKPITKSSPSLLIESDSPDKYKKKKSSFKRFLALTFKKKTENKLHVDVNVSSSRSSSESSYHGPSRILEVDRRSLSNSPQLKSRTGKLRASESPSSLIFYRDGKRKGVPFSRTVSRVESFEDRSRPPFLPLPLTKPRSISFPSADTSDYENIPAMNSDYENIQIPPRRPARAGAFTKLFEDQSRALSTANENDGYVDMSSFNAFESKQQSADQDAESAYTEPYKVCPISSAAPKEDLTSDEEQRSSEEEDSASRDPSVTHKVEGQSRALVIAQELLSSEKAYVEMLQHLNLDFHGAVMRALDDMDHEGRDTLAREELRQGLSELPAIHDLHQGILEELEERLSNWESQQKVADVFLAREQGFDHHATHILQFDRYLGLLSENCLHSPRLAAAVREFEQSVQGGSQTAKHRLLRVVQRLFQYQVLLTDYLNNLCPDSAEYDNTQGALSLISKVTDRANDSMEQGENLQKLVHIEHSVRGQGDLLQPGREFLKEGTLMKVTGKNRRPRHLFLMNDVLLYTYPQKDGKYRLKNTLAVANMKVSRPVMEKVPYALKIETSESCLMLSASSCAERDEWYGCLSRALPEDYKAQALAAFHHSVEIRERLGVSLGERPPTLVPVTHVMMCMNCGCDFSLTLRRHHCHACGKIVCRNCSRNKYPLKYLKDRMAKVCDGCFGELKKRGRAVPGLMRERPVSMSFPLSSPRFSGSAFSSVFQSINPSTFKKQKKVPSALTEVAASGEGSAISGYLSRCKRGKRHWKELWFVIKGKVLYTYMASEDKVALESMPLLGFTIAPEKEEGSSEVGPIFHLYHKKTLFYSFKAEDTNSAQRWIEAMEDASVL

SEQ ID NO: 4228 - protein, 153 aa, Homo sapiens
MTGLSDGISFLTATQRDGNGKLGLVEFNILWNRIRNYLSIFRKFDLDKSGSMSAYEMRMAIESAGFKLNKKLYELIITRYSEPDLAVDFDNFVCCLVRLETMFRFFKTLDTDLDGVVTFDLFKVGTSLGPWLGKSSRRSNFLIWPVFPVLSWK

SEQ ID NO: 4229 - protein, 398 aa, Homo sapiens
MEAGIMESPLQRKLSRQAGLPGTVWGCLPWGHPVGGHPAPPHPHGGPEDGSDKPTHPRAREHSASPRVLQEDLGRPVGSSAPRYRCVCGKAFRYNSLLLRHQIIHTGAKPFQCTECGKAFKQSSILLRHQLIHTEEKPFQCGECGKAFRQSTQLAAHHRVHTRERPYACGECGKAFSRSSRLLQHQKFHTGEKPFACTECGKAFCRRFTLNEHGRIHSGERPYRCLRCGQRFIRGSSLLKHHRLHAQEGAQDGGAGQGALLGAARRPQAGDPPHECPVCGRPFRHNSLLLLHLRLHTGEKPFECAECGKAFGRKSNLTLHQKIHTKEKPFACTECGKAFRRSYTLNEHYRLHSGERPYRCRACGRACSRLSTLIQHQKVHGREPGEDTEGRRAPCWAS

SEQ ID NO: 4230 - protein, 127 aa, Homo sapiens
MRQSGAFLSTSEGLILQLVGDAVHPQFKEVMPTWPPPPPLHLSKVLSLGSENTSRHQQAAASRGSQVLGGEAAGHCHCHKSMKGAHRWTIRATENNKMGEAIQRVRAQRRGFVLEGLGGILEQVTLE

SEQ ID NO: 4231 - protein, 155 aa, Homo sapiens [sequence omitted]

SEQ ID NO: 4232 - protein, 430 aa, Homo sapiens
MEEEEMNDGSQMVRSQESLTFQDVAVDFTREEWDQLYPAQKNLYRDVMLENYRNLVALGYQLCKPEVIAQLELEEEWVIERDSLLDTHPDGENRPEIKKSTTSQNISDENQTHEMIMERLAGDSFWYSILGGLWDFDYHPEFNQENHKRYLGQVTLTHKKITQERSLECNKFAENCNLNSNLMQQRIPSIKIPLNSDTQGNSIKHNSDLIYYQGNYVRETPYEYSECGKIFNQHILLTDHIHTAEKPSECGKAFSHTSSLSQPQMLLTGEKPYKCDECGKRFSQRIHLIQHQRIHTGEKPFICNGCGKAFRQHSSFTQHLRIHTGEKPYKCNQCGKAFSRITSLTEHHRLHTGEKPYECGFCGKAFSQRTHLNQHERTHTGEKPYKCNECGKAFSQSAHLNQHRKIHTREKLCEYKCEQTVRHSPSFSST

SEQ ID NO: 4233 - protein, 204 aa, Homo sapiens [sequence omitted]

SEQ ID NO: 4234 - protein, 214 aa, Homo sapiens
MPPFPRGLKTHYVDLVPGSVRRWPQLWGWSMLPTHSSGKWGPRHRGSAPTAAPGALVFWEGLGVCTRRPGPGTSPGAGSQGHRVCGKRCGGRAGHRRVSRRRLQAGLSQSRRRGIPSRTGVLSPTAVISSRSGRGSKQNRLREAGLGQVGGAPPCMTATVGAFRRLTAVGASGEKRGGTAVSSCGAASNWHPGTGPVQRRHLQRAGQPGAGACA

SEQ ID NO: 4235 - protein, 108 aa, Homo sapiens [sequence omitted]

SEQ ID NO: 4236 - protein, 202 aa, Homo sapiens [sequence omitted]

SEQ ID NO: 4237 - protein, 297 aa, Homo sapiens
MEPRDLPPKPGLVGHRGAPMLAPENTLMSLRKTAECGATVFETDVMVSSDGVPFLMHDEHLSRTTNVASVFPTRITAHSSDFSWTELKRLNAGSWFLERRPFWGAKPLAGPDQKEAESQTVPALEELLEEAAALNLSIMFDLRRPPQNHTYYDTFVIQTLETVLNARVPQAMVMLPGPPLPTLPSLGHDDEDDFEAAPTPRALPQLTYPILWSKLFAPVPALGIPRSSPASHPSFLNHRSFGYQMKIGLMSNDGHLECARYMDVREATERRGPSFLTSPIKICHYWISRHCIRIMSR

SEQ ID NO: 4238 - protein, 815 aa, Homo sapiens [sequence omitted]

SEQ ID NO: 4239 - protein, 261 aa, Homo sapiens [sequence omitted]

SEQ ID NO: 4240 - protein, 108 aa, Homo sapiens [sequence omitted]

SEQ ID NO: 4241 - protein, 334 aa, Homo sapiens [sequence omitted]

SEQ ID NO: 4242 - protein, 165 aa, Homo sapiens
MVPSHSAPPVCLCSAGMDLTVTGFQWWNTGYGPDSRSRPSSQKLGIDGLIVTNTTVSRPAGLQGALRSETGGLSGKPLRDLSTQTIREMYALTQGRVPIIGVGGVSSRQDVLEKIRAGASLVQLYTALTFWGPPVVGKVKRELEALLKEQGFGGVTDAIGADHRR

SEQ ID NO: 4243 - protein, 118 aa, Homo sapiens
MHISVLQPLQLPFPESQILSVLGKGPSICIFYGSSYAFFFFFFFFLRRRLALSPRLECNGVILAHCTLRLPGSSDSPASASPVAGTTGALHHAQLIFIFLIEMGFHHVGQDGLDLLTS

SEQ ID NO: 4244 - protein, 497 aa, Homo sapiens
MEFGLTWVFLVAILKGVQCEVQLVESGGGLERPGRSLRLSCSTSGFNFYDHAMSWVRQAPGKGLEWVAFIRSNVYEGTTEYDASVEGRFIISRDDSTRSVYLQMNNLRNEDTGVYFCARVPPSSGWYYNYVDVWGKGTTVIVSSASPTSPKVFPLSLCSTQPDGNVVIACLVQGFFPQEPLSVTWSESGQGVTARNFPPSQDASGDLYTTSSQLTLPATQCLAGKSVTCHVKHYTNPSQDVTVPCPVPSTPPTPSPSTPPTPSPSCCHPRLSLHRPALEDLLLGSEANLTCTLTGLRDASGVTFTWTPSSGKSAVQGPPERDLCGCYSVSSVLPGCAEPWNHGKTFTCTAAYPESKTPLTATLSKSGNTFRPEVHLLPPPSEELALNELVTLTCLARGFSPKDVLVRWLQGSQELPREKYLTWASRQEPGQGTTTFAVTSILRVAAEDWKKGDTFSCMVGHEALPLAFTQKTIDRLAGKPTHVNVSVVMAEVDGTCY

SEQ ID NO: 4245 - protein, 502 aa, Homo sapiens [sequence omitted]

SEQ ID NO: 4246 - protein, 465 aa, Homo sapiens [sequence omitted]

SEQ ID NO: 4247 - protein, 535 aa, Homo sapiens
MDTGLTWVFLVGLLRGVQSVVEIVESGGGVVQPGTSLRLSCSASGFTFRNSAMYWVRQAPGKGLEWVGLIWNDGSHKYYGDSVRGRFTISRDNSRNMFYLQMNSLKVEDTATYYCAKEAADNCRIDGHEMWRCLADKQKGSRDDVDVWGQGITVTVSTASTKGPSVFPLAPCSRSTSGGTAALGCLVKDYFPEPVTVSWNSGALTSGVHTFPAVLQSSGLYSLSSVVTVPSSSLGTQTYTCNVNHKPSNTKVDKRVELKTPLGDTTHTCPRCPEPKSCDTPPPCPRCPEPKSCDTPPPCPRCPEPKSCDTPPPCPRCPAPELLGGPSVFLFPPKPKDTLMISRTPEVTCVVVDVSHEDPEVQFKWYVDGVEVHNAKTKPREEQFNSTFRVVSVLTVLHQDWLNGKEYKCKVSNKALPAPIEKTISKTKGQPREPQVYTLPPSREEMTKNQVSLTCLVKGFYPSDIAVEWESSGQPENNYNTTPPMLDSDGSFFLYSKLTVDKSRWQQGNIFSCSVMHEALHNRFTQKSLSLSPGK

SEQ ID NO: 4248 - protein, 644 aa, Homo sapiens [sequence omitted]

SEQ ID NO: 4249 - protein, 238 aa, Homo sapiens
MQLEALNLLHTLVWARSLCRAGAVQTQERLSGSASPEQVPAGECCALQEYEAAVEQLKSEQIRAQAEERRKTLSEETRQHQARAQYQDKLARQRYEDQLKQQQLLNEENLRKQEESVQKQEAMRRATVEREMELRHKNEMLRVETEARARAKAERENADIIREQIRLKASEHRQTVLESIRTAGTLFGEGFRAFVTDRDKVTATVNIFIKQGWQVAERQHVGASWSPRSCPCRLCTAL

SEQ ID NO: 4250 - protein, 457 aa, Homo sapiens
MRFFCARCCSFGPEMPAVQLLLLACLVWDVGARTAQLRKANDQSGRCQYTFSVASPNESSCPEQSQAMSVIHNLQRDSSTQRLDLEATKARLSSLESLLRDKSVLEEEKKRLRQENENLARRLESSSQEVARLRRGQCPQTRDTARAVPPGSREVSTWNLDTLAFQELKSELTEVPASRILKESPSGYLRSGEGDTGCGELVWVGEPLTLRTAETITGKYGVWMRDPKPTYPYTQETTWRIDTVGTDVRQVFEYDLISQFMQGYPSKVHILPRPLESTGAVVYSGSLYFQGAESRTVIRYELNTETVKAEKEIPGAGYHGQFPYSWGGYTDIDLAVDEAGLWVIYSTDEAKGAIVLSKLNPENLELEQTWETNIRKQSVANAFIICGTLYTVSSYTSADATVNFAYDTGTGISKTLTIPFKNRYKYSSMIDYNPLEKKLFAWDNLNMVTYDIKLSKM

SEQ ID NO: 4251 - protein, 117 aa, Homo sapiens
MDHPMSMQPANMMGPLTQQMNHLSLGTTGTIQSQDRIMILHQLLCQYMTAAAPMQGTYIPQYTPVPPTAVSIEGVVADTSPQTVAPSSQDTSGQQQQIAVDTSNEHAPAYSYQQSKP

SEQ ID NO: 4252 - protein, 111 aa, Homo sapiens [sequence omitted]

SEQ ID NO: 4253 - protein, 108 aa, Homo sapiens
MRLELNRPGPHSLPPPPPLVPFLWTSHPVFRFQPTYLSNLRGLRARWLELPRFLPAAAGHPRLSTPTLPWVTALWCPDVPDPTPACPTVGAAGELSLCCAPPPGCLSM

SEQ ID NO: 4254 - protein, 296 aa, Homo sapiens
MAPWQGVGRRPWFLTWGPLCGAASVSPSMTVASSQQGWDCTAGRRWLGEGEIEALAQVSEFKTVLSFQGPAASPDGSSATRVPQDVTQGPGATGGKEDSGMIPLAGTAPGAEGPAPGDSQAVRPYKQEPSSPPLAPGLPAFLAAPGTTSCPECGKTSLKPAHLLRHRQSHSGEKPHACPECGKAFRRKEHLRRHRDTHPGSPGSPGPALRPLPAREKPHACCECGKTFYWREHLVRHRKTHSGARPFACWECGKGFGRREHVLRHQRIHGRAAASAQGAVAPGPDGGGPFPPWPLG

SEQ ID NO: 4255 - protein, 500 aa, Homo sapiens
MEFGLSWVFLIAFIRGVQSLGHLVESGGGLVKPGASLRLSCEASGFTFSDYYMTWMRQSPGKGLEWVAYISRTNTNIYYADFVKGRFTISRDNARNSLYLQMNGLRAEDTAIYYCARDSREYVDLWRGLPKGYFDLWGRGTRITVSPASPTSPKVFPLSLCSTQPDGNVVIACLVQGFFPQEPLSVTWSESGQGVTARNFPPSQDASGDLYTTSSQLTLPATQCLAGKSVTCHVKHYTNPSQDVTVPCPVPSTPPTPSPSTPPTPSPSCCHPLLSLHRPALEDLLLGSEANLTCTLTGLRDASGVTFTWTPSSGKSAVQGPPERDLCGCYSVSSVLPGCAEPWNHGKTFTCTAAYPESKTPLTATLSKSGNTFRPEVHLLPPPSEELALNELVTLTCLARGFSPKDVLVRWLQGSQELPREKYLTWASRQEPSQGTTTFAVTSILRVAAEDWKKGDTFSCMVGHEALPLAFTQKTIDRLAGKPTHVNVSVVMAEVDGTCY

SEQ ID NO: 4256 - protein, 153 aa, Homo sapiens
MSWGWRAERRAGARRALEGMGHAAAWRAGTRASAPAPPATWSGGCGPAPGRSAARGLRPGCADACARPARPLSAGTGGAARPRCLAPAVLPARPRGCPTVRRAPTWAAPESGPCAGAPRAAGAPAASRCAPGCAVAPRRTAACPGCGSRRAPA

SEQ ID NO: 4257 - protein, 128 aa, Homo sapiens [sequence omitted]

SEQ ID NO: 4258 - protein, 167 aa, Homo sapiens [sequence omitted]

SEQ ID NO: 4259 - protein, 183 aa, Homo sapiens
MYHMSAVRRGVWAGKRRGCLRRREVGGLQLNSDPGENQEALIPAAPVVTGPYVFQAMAEKFLEGEVPLETFLENFSSMRMLSHLRRVRVEKLQEVVRKPRASQELAGDAPPPRPPPPVRPVPQGTPPVVEEQPQPPSAMPPYPLPYSPSPSLPVGPRPTCHPRDARSALPVLYQMCLLLLSYL

SEQ ID NO: 4260 - protein, 159 aa, Homo sapiens
MPRQDLPRSRLGFLGLGGCGLIVKHGMTLRNWASFFVVFQAWSLMILQVLGDMLNIYYAYIQATLTLKVDVAPRLFFPEGGALKEHFSSMDSFQLREAGGTRIPRPALIYGRAVVTRTVTKAQSLRSALAWAALGCKHPVLSTLCEESQQGAWSEFRRF

SEQ ID NO: 4261 - protein, 168 aa, Homo sapiens
MASFPLLLTLLTHCAGSWAQSGLIQPPSASGTPGQTVTITCSGTSSNIEGNAVNWYQQVPGEAPKLLIYDSYRRPSGVPSRFSGSKSGTSASLAISGLRSDDEGFYFCAPWDSGLNGLLFGGGTKLTVLSESSPPSPAPLLFQCRSSHLVLNLFSRCPRPFLLPPRPP

SEQ ID NO: 4262 - protein, 491 aa, Homo sapiens
MDFGLSWVFLVAILKGVQCEVVLVESGGSVVQPGGSLRLSCASSGFKFDDYAMHWARQVPGKSLEWVSLITGGGDRTFYADSVKGRFTTSRDNIKNTLYLQMTDLRSEDSALYFCAKEKYPRGAFHMWGQGTMVTVSSASPTSPKVFPLSLCSTQPDGNVVIACLVQGFFPQEPLSVTWSESGQGVTARNFPPSQDASGDLYTTSSQLTLPATQCLAGKSVTCHVKHYTNPSQDVTVPCPVPSTPPTPSPSTPPTPSPSCCHPRLSLHRPALEDLLLGSEANLTCTLTGLRDASGVTFTWTPSSGKSAVQGPPERDLCGCYSVSSVLPGCAEPWNHGKTFTCTAAYPESKTPLTATLSKSGNTFRPEVHLLPPPSEELALNELVTLTCLARGFSPKDVLVRWLQGSQELPREKYLTWASRQEPSQGTTTFAVTSILRVAAEDWKKGDTFSCMVGHEALPLAFTQKTIDRLAGKPTHVNVSVVMAEVDGTCY

SEQ ID NO: 4263 - protein, 388 aa, Homo sapiens
MFEAIGFLAIKLGVIPSDFSYAGLKDKKAITYQAMVVRKVTPERLKNIEKEIEKKRMNVFNIRSVDDSLRLGQLKGNHFDIVIRNLKKQINDSANLRERIMEAIENVKKKGFVNYYGPQRFGKGRKVHTDQIGLALLKNEMMKAIKLFLTPEDLDDPVNRAKKYFLQTEDAKGTLSLMPEFKVRERALLEALHRFGMTEEGCIQAWFSLPHSMRIFYVHAYTSKIWNEAVSYRLETYGARVVQGDLVCLDEDIDDENFPNSKIHLVTEEEGSANMYAIHQVVLPVLGYNIQYPKNKVGQWYHDILSRDGLQTCRFKVPTLKLNIPGCYRQILKHPCNLSYQLMEDHDIDVKTKGSHIDETALSLLISFDLDASCYATVCLKEIMKHDV

SEQ ID NO: 4264 - protein, 130 aa, Homo sapiens [sequence omitted]

SEQ ID NO: 4265 - protein, 134 aa, Homo sapiens
MLSALVTRVLVLHRVSRPGQAQPSVSCDSLGGTRHDFPQNLHFMRQQPGLQGGGAAPGAGPHTGTAQGTHTSPTTHAGQGRKRSREGCPARSKCSCPAQGRRSLLRVCCWRREACFPLLPAPASVPARPPGSGL

SEQ ID NO: 4266 - protein, 109 aa, Homo sapiens
MFGIQENIPRGGTTMKEEPLGSGMNPVRSWMHTAGVVDANTAAQSGVGLARAHFEKQPPSNLRKSNFFHFVLALYDRQGQPVEIERTAFVDFVEKEKVSANTRSHPLSF

SEQ ID NO: 4267 - protein, 127 aa, Homo sapiens
MGGPRGSGGSGGGGGRRGSQPCEEVDGVVPRGRTDGQVGECTEGAAPHKHSPQGLSGAQAEERRLDSTDGCNICLRTQTKWRWSRRWHTELAKDRPNAAGRKRKEEADEAGRGVHVLSEEGLSTHLR

SEQ ID NO: 4268 - protein, 346 aa, Homo sapiens
MSQTRKKTSSEGETKPQTSTVNKFLRGSNAESRKEDNDLKTSDSQPSDWIQKTATSETAKPLSSEMEWRSSMEKNEHFLQKLGKKAVNKCLDLNNCGLTTADMKEMVALLPFLPDLEELDISWNGFVGGTLLSITQQMHLVSKLKILRLGSCRLTTDDVQALGEAFEMIPELEELNLSWNSKVGGNLPLILQKFQKGSKIQMIELVDCSLTSEDGTFLGQLLPMLQSLEVLDLSINRDIVGSLNSIAQGLKSTSNLKVLKLHSCGLSQKSVKILDAAFRYLGELRKLDLSCNKDLGGGFEDSPAQLVMLKHLQVLDLHQCSLTADDVMSLNSYLSIWENGKNSRLS

SEQ ID NO: 4269 - protein, 120 aa, Homo sapiens [sequence omitted]

SEQ ID NO: 4270 - protein, 142 aa, Homo sapiens
MLDAACPQTSDCKFFSFWTLGLTPVICQELSGLQQQTEGCAVGFPTFEVLGLRLASWLFSLQMAYCGTSPCDHLARASWGNGAPGVVVQTSASLQPVCGGARCSRSLRTAGRPAHPWKRELAAWSTPPRRARTAGTPMFLPL

SEQ ID NO: 4271 - protein, 116 aa, Homo sapiens
MHTHLWFWTTDVDVPGTTWTGAIADRPEDLLGLIDLKASLGSGSYRDLVAALSHRAKTDGARNTPFLQHRSRNRYLRTLFTPQLVSLTHMGARPSARQRIQVSRLQIRAGCSGSCL

SEQ ID NO: 4272 - protein, 157 aa, Homo sapiens
MGLCHHAWLIFLFLVEMGFYHVGQASVQLLTSKQLIFVFLIETGFRHVAQPRLELLGSNDPPTSASQSAGIIGMSHHTWPFQFFYFYFFFETESRSVAQAGVQWRDLGSLKPPSPGFKQFSCLSLLSSWDYRCLPPCLANFCIFSRDRVLPHCPGWC

SEQ ID NO: 4273 - protein, 506 aa, Homo sapiens [sequence omitted]

SEQ ID NO: 4274 - protein, 558 aa, Homo sapiens
MGGLSPTLYWLGNFLWDMCNYLVPACIVVLIFLAFQQRAYVAPANLPALLLLLLLYGTAYVVLTCINLFIGINGSMATFVLELFSDQKLQEVSRILKQVFLIFPHFCLGRGLIDMVRNQAMADAFERLGDRQFQSPLRWEVVGKNLLAMVIQGPLFLLFTLLLQHRSQLLPQPRVRSLPLLGEEDEDVARERERVVQGATQGDVLVLRNLTKVYRGQRMPAVDRLCLGIPPGECFGLLGVNGAGKTSTFRMVTGDTLASRGEAVLAGHSVAREPSAAHLSMGYCPQSDAIFELLTGREHLELLARLRGVPEAQVAQTAGSGLARLGLSWYADRPAGTYSGGNKRKLATALALVGDPAVVFLDEPTTGMDPSARRFLWNSLLAVVREGRSVMLTSHSMEECEALCSRLAIMVNGRFRCLGSPQHLKGRFAAGHTLTLRVPAARSQPAAAFVAAEFPGAELREAHGGRLRFQLPPGGRCALARVFGELAVHGAEHGVEDFSVSQTMLEEVFLYFSKDQGKDEDTEEQKEAGVGVDPAPGLQHPKRVSQFLDDPSTAETVL

SEQ ID NO: 4275 - protein, 494 aa, Homo sapiens
MESGLSWVFLVAILEGVYCDEQLVESGGGLVRPGGSLRLSCEASGFTFSDFWMTWVRQAPGKRLEWVASVHQNGRERYDAASLGGRFTISRDNTKNSLYLQMKSLGPEDTAVYYCGRDYGYSSGDEAFTLWGQGTKVTVSSASPTSPKVFPLSLCSTQPDGNVVIACLVQGFFPQEPLSVTWSESGQGVTARNFPPSQDASGDLYTTSSQLTLPATQCLAGKSVTCHVKHYTNPSQDVTVPCPVPSTPPTPSPSTPPTPSPSCCHPRLSLHRPALEDLLLGSEANLTCTLTGLRDASGVTFTWTPSSGKSAVQGPPERDLCGCYSVSSVLPGCAEPWNHGKTFTCTAAYPESKTPLTATLSKSGNTFRPEVHLLPPPSEELALNELVTLTCLARGFSPKDVLVRWLQGSQELPREKYLTWASRQEPSQGTTTFAVTSILRVAAEDWKKGDTFSCMVGHEALPLAFTQKTIDRLAGKPTHVNVSVVMAEVDGTCY

SEQ ID NO: 4276 - protein, 181 aa, Homo sapiens
MGFHHVAQAGLELPTSGDPSALASQGAGITGVSHRTWPQASISLALNHSWLGPSPVEPAPQPGVLLKCSKVVNPQPFPSPVARFCRSPLKAVAWAVPSFIPASRAKPRYPLVPCVVWQRLLSGRVRSNFFFQWPLCASPGHLRELKSYRYKGDPPPRKAPPVRVGDSHTGFLHRFLSASEA

SEQ ID NO: 4277 - protein, 495 aa, Homo sapiens
MDWTWRILFLVAAATGVHSQAQLVQSGAEVKKPGASLKISCKASGYIFSTFAVHWVRQAPGQRLQWLGWIDAATGNTRFPPEFLDRVILRRDTSASTVYMELASLTSEDSALYYCARGTPLRMETEFAYDVWGQGTRVTVSSTSPTSPKVFPLSLCSTQPDGNVVIACLVQGFFPQEPLSVTWSESGQGVTARNFPPSQDASGDLYTTSSQLTLPATQCLAGKSVTCHVKHYTNPSQDVTVPCPVPSTPPTPSPSTPPTPSPSCCHPRLSLHRPALEDLLLGSEANLTCTLTGLRDASGVTFTWTPSSGKSAVQGPPERDLCGCYSVSSVLPGCAEPWNHGKTFTCTAAYPESKTPLTATLSKSGNTFRPEVHLLPPPSEELALNELVTLTCLARGFSPKDVLVRWLQGSQELPREKYLTWASRQEPSQGTTTFAVTSILRVAAEDWKKGDTFSCMVGHEALPLAFTQKTIDRLAGKPTHVNVSVVMAEVDGTCY

SEQ ID NO: 4278 - protein, 473 aa, Homo sapiens [sequence omitted]

SEQ ID NO: 4279 - protein, 123 aa, Homo sapiens
MRSEKSKGCWRDGGDAHPGEKASQSSGITGVSHRTRLTSVLLRNTQRRRHRRGEHHVMVDTEIGVLQPQAKELLEPPGDGRCKELIFSQSLWRECGPGDTLILDFWPTEPCTQEDFISQVSLQ

SEQ ID NO: 4280 - protein, 372 aa, Homo sapiens
MEVVEAAAAQLETLKFNGTDFGVGEGPAAPSPGSAPVPGTQPPLQSFEGSPDAGQTVEVKPAGEQPLQPVLNAVAAGTPAPQPQPPAESPACGDCVTSPGAAEPARAPDSLETSDSDSDSDSETDSDSSSSSSSSSSSSSSSSSSCISLPPVLSDGDDDLQVEKENKNFPLKTKDELLLNELPSVEELTIILPEDIELKPLGMVSSIIEQLVIIESMTNLPPVNEETVIFKSDRQAAGKIFEIFGPVAHPFYVLRFNSSDHIESKGIKIKETMYFAPSMKDFTQYIFTEKLKQDKGSDASWKNDQEPPPETWGSQCVAQAGLKLLASSDSPALKQASALAPQSAGITGMSPLPSQYYRFLILTDLTLAILDV

SEQ ID NO: 4281 - protein, 236 aa, Homo sapiens [sequence omitted]

SEQ ID NO: 4282 - protein, 474 aa, Homo sapiens [sequence omitted]

SEQ ID NO: 4283 - protein, 516 aa, Homo sapiens [sequence omitted]

SEQ ID NO: 4284 - protein, 473 aa, Homo sapiens [sequence omitted]

SEQ ID NO: 4285 - protein, 471 aa, Homo sapiens [sequence omitted]

SEQ ID NO: 4286 - protein, 174 aa, Homo sapiens [sequence omitted]

SEQ ID NO: 4287 - protein, 469 aa, Homo sapiens [sequence omitted]

SEQ ID NO: 4288 - protein, 476 aa, Homo sapiens [sequence omitted]

SEQ ID NO: 4289 - protein, 477 aa, Homo sapiens [sequence omitted]

SEQ ID NO: 4290 - protein, 491 aa, Homo sapiens
MKLLWFFLLLVAPPRWVLSEVQLRESGPGLMKPSGTLSLICSVSGDSMNGYYWAWIRQSPDKGLEWIAYIDYTGHSTYSPSLKSRVTISVDVSQSQFSLRVTSVTSADTAKYYCATSVMGGGRHFDYWGQGVLVTVSSASPTSPKVFPLSLCSTQPDGNVVIACLVQGFFPQEPLSVTWSESGQGVTARNFPPSQDASGDLYTTSSQLTLPATQCLAGKSVTCHVKHYTNPSQDVTVPCPVPSTPPTPSPSTPPTPSPSCCHPRLSLHRPALEDLLLGSEANLTCTLTGLRDASGVTFTWTPSSGKSAVQGPPERDLCGCYSVSSVLPGCAEPWNHGKTFTCTAAYPESKTPLTATLSKSGNTFRPEVHLLPPPSEELALNELVTLTCLARGFSPKDVLVRWLQGSQELPREKYLTWASRQEPSQGTTTFAVTSILRVAAEDWKKGDTFSCMVGHEALPLAFTQKTIDRLAGKPTHVNVSVVMAEVDGTCY

SEQ ID NO: 4291 - protein, 472 aa, Homo sapiens [sequence omitted]

SEQ ID NO: 4292 - protein, 470 aa, Homo sapiens [sequence omitted]

SEQ ID NO: 4293 - protein, 467 aa, Homo sapiens [sequence omitted]

SEQ ID NO: 4294 - protein, 471 aa, Homo sapiens [sequence omitted]

SEQ ID NO: 4295 - protein, 472 aa, Homo sapiens [sequence omitted]

SEQ ID NO: 4296 - protein, 479 aa, Homo sapiens [sequence omitted]

SEQ ID NO: 4297 - protein, 765 aa, Homo sapiens
MDGLLMVSGRRHNADDIVATGLAVESIKTVYRGRIAVFSVSVFYDERIVVVAEQRPDASEEDSFQWMSRVLQAIDSIHQVGVYCLALVPANTLPKTPLGGIHISQTKQLFLEGSLHPCNILMCPHTCVTNLPKPRQKQPGVGPASVMVGNLVAGKRIAQAAGRDLGQIEENDLVRKHQFLAEILQWRAQATPDHVLFMLLNAKGTTVCTASCLQLHKRAERIASVLGDKGHLNAGDNVVLLYPPGIELIAAFYGCLYAGCIPVTVRPPHAQNLTATLPTVRMIVDVSKAACILTSQTLMRLLRSREAAAAVDVKTWPTIIDTDDLPRKRLPQLYKPPTPEMLAYLDFSVSTTGMLTGVKMSHSAVNALCRAIKLQCELYSSRQIAICLDPYCGLGFALWCLCSVYSGHQSVLIPPMELENNLFLWLSTVNQYKIRDTFCSYSVMELCTKGLGNQVEVLKTRGINLSCVRTCVVVAEERPRVALQQSFSKLFKDIGLSPRAVSTTFGSRVNVAICLQGTSGPDPTTVYVDLKSLRHDRVRLVERGAPQSLLLSESGKILPGVKVVIVNPETKGPVGDSHLGEIWVNSPHTASGYYTIYDSETLQADHFNTRLSFGDAAQTLRARTGYLGFVRRTELTAATGERHDALYVVGALDETLELRGLRYHPIDIETSVSRIHRSIAECAVFTWTNLLVVVVELCGSEQEALDLVPLVTNVVLEEHYLIVGVVVVVDPGVIPINSRGEKQRMHLRDSFLADQLDPIYVAYNM

SEQ ID NO: 4298 - protein, 180 aa, Homo sapiens
MEVVQVLTKPAGNPSCMYPQGTFVIPLLATAHRDPTQFKDPDCFNPTNFLDKGKFQGNDAFMPFASGAGRGGRGPAWTGSGVPGAHCAPVYPAKQMCLGTGLAHSGIFLFLTATLQRFCLLPVVRPGTINLTCSALAWAVSPQTSSSSQWPAEVRLHYGGLTGPQTSIPSSVNKGPKLQM

SEQ ID NO: 4299 - protein, 626 aa, Homo sapiens
MASGEHSPGSGAARRPLHSAQAVDVASASNFRAFELLHLHLDLRCLEPEGAAELRLDSHPCLEVTAAALRRERPGSEEPPAEPVSFYTQPFSHYGQALCVSFPQPCRAAERLQVLLTYRVGEGPGVCWLAPEQTAGKKKPFVYTQGQAVLNRAFFPCFDTPAVKYKYSALIEVPDGFTAVMSASTWEKRGPNKFFFQMCQPIPSYLIALAIGDLVSAEVGPRSRVWAEPCLIDAAKEEYNGVIEEFLATGEKLFGPYVWGRYDLLFMPPSFPFGGMENPCLTFVTPCLLAGDRSLADVIIHEISHSWFGNLVTNANWGEFWLNEGFTMYAQRRISTILFGAAYTCLEAATGRALLRQHMDITGEENPLNKLRVKIEPGVDPDDTYNETPYEKGFCFVSYLAHLVGDQDQFDSFLKAYVHEFKFRSILADDFLDFYLEYFPELKKKRVDIIPGFEFDRWLNTPGWPPYLPDLSPGDSLMKPAEELAQLWAAEELDMKAIEAVAISPWKTYQLVYFLDKILQKSPLPPGNVKKLGDTYPSISNARNAELRLRWGQIILKNDHQEDFWKVKEFLHNQGKQKYTLPLYHAMMGGSEVAQTLAKETFASTASQLHSNVVNYVQQIVAPKGS

SEQ ID NO: 4300 - protein, 340 aa, Homo sapiens
MEPSWLQELMAHPFLLLILLCMSLLLFQVIRLYRRRRWTIRAMHLFPAPPAHWFYGHKESYPVKEFEVYPELMEKYPCAVPLWVGPFTMFFNIHDPDYVKILLKRQDPKSAVSHKILESWVGRGLVTLDGSKWKKHRQIVKPGFNISILKIFITMMSKSVRMMLNKWEEHIAQNSRLELFQHVSLMTLDSIMKCAFSHQGSIQLDSTLDSYLKAVFNLSKISNQRMNNFLHHNDLVFKFSSQGQIFSKFNQELHQFTEKVIQDRKESLKDKLKQDTTQKRRQDFLDILLSAKSENTKDFSEADLQAEVKTFMFAGHDTTTTAISWIFYCLAKYPEHQQRC

SEQ ID NO: 4301 - protein, 1106 aa, Homo sapiens [sequence omitted]

SEQ ID NO: 4302 - protein, 289 aa, Homo sapiens
MGTLSCDSTPRLATAPLGRRVTEGQIPETGLRKSCGTATLENGSGPGLYVLPSTVGFINHDCTRVASPAYSLVRRPSEAPPQDTSPGPIYFLDPKVTRFGRSCTPAYSMQGRAKSRGPEVTPGPGAYSPEKVPPVRHRTPPAFTLGCRLPLKPLDTSAPAPNAYTMPPLWGSQIFTKPSSPSYTVVGRTPPARPPQDPAEIPGPGQYDSPDANTYRQRLPAFTMLGRPRAPRPLEETPGPGAHCPEQVTVNKARAPAFSMGIRHSKRASTMAATTPSRPAGHRLPGRCC

SEQ ID NO: 4303 - protein, 112 aa, Homo sapiens
MSLVCPGRLRLWPIFFSQVPMENQGLSCAIFREPGRVRPWAFRAPKGPHAALRVPQRCCLTMLAPDSLGLLGSRYPPWPPKVLGLQVLPTEDLVTYPCTHHTGYCDIAEPSI

SEQ ID NO: 4304 - protein, 295 aa, Homo sapiens
MSWESGAGPGLGSQGMDLVWSAWYGKCVKGKGSLPLSAHGIVVAWLSRAEWDQVTVYLFCDDHKLQRYALNRITVWRSRFVNLISERKTKFAKVPLKCLAQEVNIPDWIVDLRHELTHKKMPHINDCRRGCYFVLDWLQKTYWCRQLENSLRETWELEEFREGIEEEDQEEDKNIVVDDITEQKPEPQDDGKSTESDVKADGDSKGSEEVDSHCKKALSHKELYERARELLVSYEEEQFTVLEKFRYLPKAIKAWNNPSPRVECVLAELKGVTCENREAVLDAFLDDGFLVPTFE

SEQ ID NO: 4305 - protein, 276 aa, Homo sapiens
MDMNRRASCLLPDLCGQGWGWRLFPASCAYLGSVPWRVWGLGGLLAPLAAAGGGSTSGLGHLGSTQWSGELVVLLSEVFITGCLFSCNGGYPAEAWNFWTRKGLVSGGLYESHVGCRPYSIPPCEHHVNGSRPPCTGEGDTPKCSKICEPGYSPTYKQDKHYGYNSYSVSNSEKDIMAEIYKNGPVEGAFSVYSDFLLYKSGVYQHVTGEMMGGHAIRILGWGVENGTPYWLVANSWNTDWGDNGFFKILRGQDHCGIESEVVAGIPRTDQYWEKI

SEQ ID NO: 4306 - protein, 117 aa, Homo sapiens
MELIQDTSRPPLEYVKGVPLIKYFAEALGPLQSFQARPDDLLINTYPKSGTTWVSQILDMIYQGGDLEKCNRAPIYVRVPFLEVNDPGEPSGGLCCPKPKGRGGLLLPFPPYGKGAP

SEQ ID NO: 4307 - protein, 114 aa, Homo sapiens [sequence omitted]

SEQ ID NO: 4308 - protein, 541 aa, Homo sapiens
MTTPAGSGSGFGSVSWWGLSPALDLQAESPPVDPDSQADTVHSNPELDVLLLGSVDGRHLLRTLSRAKFWPRRRFNFFVLENNLEAVARHMLIFSLALEEPEKMGLQERSETFLEVWGNALLRPPVAAFVRAQADLLAHLVPEPDRLEEQLPWLSLRALKFRERDALEAVFRFWAGGEKGPQAFPMSRLWDSRLRHYLGSRYDARRGVSDWDLRMKLHDRGAQVIHPQEFRRWRDTGVAFELRDSSAYHVPNRTLASGRLLSYRGERVAARGYWGDIATGPFVAFGIEADDESLLRTSNGQPVKTAGEITQHNVTELLRDVAAWGRARATGGDLEEQQHAEGSPEPGTPAAPTPESFTVHFLPLNSAQTLHHKSCYNGRFQLLYVACGMVHLLIPELGACVAPGGNLIVELARYLVDVRQEQLQGFNTRVRELAQAAGFAPQTGARPSETFARFCKSQESALGNTVPAVEPGTPPLDILAQPLEASNPALEGLTQPLQGGTPHCEPCQLPSESPGSLSEVLAQPQGALAPPNCESDSKTGV

SEQ ID NO: 4309 - protein, 271 aa, Homo sapiens
MGPPGSSPTPEPPQKEVQKEGAADPKQVGEPSGQKTLDGSSRSAELVPQGEDDSEYLERDAPAGDAGRWLRVSFGLFGSVWVNDFSRAKKANKRGDWRDPSPRLVLHFGGGGFLAFYNCQLSWSSSPVVTPTCDILSEKFHRGQALEALGQAQPVCYTLLDQRYFSGLGNIIKNEALYRAGIHPLSLGSVLSASRREVLVDHVVEFSTAWLQGKFQGRPQHTQVYQKEQCPAGHQVMKEAFGPEDGLQRLTWWCPQCQPQLSEEPEQCQFS

SEQ ID NO: 4310 - protein, 394 aa, Homo sapiens
MATAQLQRTPMSALVFPNKISTEHQSLVLVKRLLAVSVSCITYLRGIFPECAYGTRYLDDLCVKILREDKNCPGSTQLVKWMLGCYDALQKKYLRMVVLAVYTNPEDPQTISECYQFKFKYTNNGPLMDFISKNQSNESSMLSTDTKKASILLIRKIYILMQNLGPLPNDVCLTMKLFYYDEVTPPDYQPPGFKDGDCEGVIFEGEPMYLNVGEVSTPFHIFKVKVTTERERMENIDSTILSPKQIKTPFQKILRDKDVEDEQEHYTSDDLDIETKMEEQEKNPASSELEEPSLVCEEDEIMRSKESPDLSISHSQVEQLVNKTSELDMSESKTRSGKVFQNKMANGNQPVKSSKENRKRSQHESGRIVLHHFDSSSQESVPKRRKFSEPKEHI

SEQ ID NO: 4311 - protein, 172 aa, Homo sapiens
MSFLCLVVLYYIVWSVLFLRSMDVIAEQRRTHITMALSWMTIVVPLLTFEILLVHKLDGHNAFSCIPIFVPLWLSLITLMATTFGQKGGNHWWFGIRKDFCQFLLEIFPFLREYGNISYDLHHEDNEETEETPVPEPPKIAPMFRKKARVVITQSPGKYVLPPPKLNIEMPD

SEQ ID NO: 4312 - protein, 698 aa, Homo sapiens
MPQCPTLESQEGENSEEKGDSSKEDPKETVALAFVRENPGAQNGLQNAQQQGKKKRKKKRLVINLSSCRYESVRRAAQQYGFREGGEDDDWTLYWTDYSVSLERVMEMKSYQKINHFPGMSEICRKDLLARNMSRMLKMFPKDFRFFPRTWCLPADWGDLQTYSRSRKNKTYICKPDSGCQGKGIFITRTVKEIKPGEDMICQLYISKPFIIDGFKFDLRIYVLVTSCDPLRIFVYNEGLARFATTSYSRPCTDNLDDICMHLTNYSINKHSSNFSRDAHSGSKRKLSTFSAYLEDHSYNVEQIWRDIEDVIIKTLISAHPIIRHNYHTCFPNHTLNSACFEILGFDILLDHKLKPWLLEVNHSPSFSTDSRLDKEVKDGLLYDTLVLINLESCDKKKVLEEERQRGQFLQQCCSREMRIEEAKGFRTVQLKKTETYEKENCGGFRLIYPSLNSEKYEKFFQDNNSLFQNTVASRAREEYARQLIQELRLKREKKPFQMKKKVEMQGESAGEQVRKKGMRGWQQKQQQKDKAATQASKQYIQPLTLVSYTPDLLLSVRGERKNETDSSLNQEAPTEEASSVFPKLTSAKPFSSLPDLRNINLSSSKLEPSKPNFSIKEAKSASAVNVFTGTVHLTSVETTPESTTQLSISPKSPPTLAVTASSDYSGPETDRVVSFKCKKQQTPPHLTQKKMLKSFLP

SEQ ID NO: 4313 - protein, 216 aa, Homo sapiens
MSINYNQLASIPRELCFLENLVELQLNYNQLICIPEEIKFLKKLQKLLLARNNIGVLPEELCDLKKLRILDIAGNIIQIFPSGFQDLKLREFYCEGNPLFLQQPVISTQQENVWGLQEITSRFVMNQLAENNPFLMDDIERYPQVRSMISQGKTCAICGQYFITVWLECVRFVPPPKKLQPNTSNNSQNLFGTECASGALLNMSPGIPQLMSKITP

SEQ ID NO: 4314 - protein, 363 aa, Homo sapiens
MAHVLQKPKHSGTHSIVQEFQVPDYVPWQQSKQETKPSTLPPVQQANSLHTSKMKTLTRVQPVFHFKPTTVVTSCQPKNPRELHRRRKLDPGKMHAKIWLMKTSLRSGRAALRELRSRENFLSKLNRELIETIQEMENSTTLHVRALLQQQDTLATIIDILEYSNKKRLQQLKSELQEWEEKKKCKMSYLEQQAEQLNAKIEKTQEEVNFLSTYMDHEYSIKSVQISTLMRQLQQVKDSQQDELDDLGEMRRKVLESLSDKIQKKKKKILSSVVAETQRPYEEALLQKMWESQDFLKCMQRFREFIDQFEENMPVLRAEVEELQAQTREPREVIFEDVLLRRPKCTPDMDVILNIPVEEPLPF

SEQ ID NO: 4315 - protein, 117 aa, Homo sapiens
MFASISPSHLTPSSASQNIPWYLRPFQFPPGFVGGRIKKKLHCSHPHSYSHFIKRKSSLEPLQNKIPATTPLFSFRLQLFILAKKLQSAPPRRKEYPVLMGVHRRLQAAPLQRLTSR

SEQ ID NO: 4316 - protein, 653 aa, Homo sapiens [sequence omitted]

SEQ ID NO: 4317 - protein, 172 aa, Homo sapiens
MPVGAGLPTSLTSPPSTEAPKSSLLRKQTQPPKKQSSPAVHLRCTMDPVMMTVSPPPAHRHRRRGSPTRCAHCPVAWAPDTDDEKPHQYPAICSYHWDVPEDWEGFQHTQGTWVPWSQDAPESPPQTIRFQPGQQSETPSQKKKKKKKKRNIGAPLKRYLTVTSQLSVTSLL

SEQ ID NO: 4318 - protein, 611 aa, Homo sapiens
MSEIPSTIVSKNMTNDKNSLESMNISSSSSTEENPEKQARKNEEHGPDPSANPFHLSGDVDFFLLRDQERNKALSERQQQKTMRVHQKMTYSSKVSAKHTSLRRQLQLEDKQEDLEARAEAEHQRAFRDYTTWKLTLTKEKNVEPENMSGYIKQKRQMFLLQYALDVKRREIQRLETLATKEEARLERAEKSLEKDAALFDEFVRENDCSSVQAMRAAEKETKAKIEKILEIRDLTTQIVNIKGEISRFEDTLKHYKVYKDFLYKLSPKEWLEEQEKKHSFLKKAKEVSEASKESSVNSTPGDKGPGIKGKASSMWAKEGQGTKKPWRFLQTMRLGRSPSYLSSPQQGSQPSESSGGDSRGSNSPIPPTQEDTDSDGEEPQLYFTEPQQLLDVFRELEEQNLSLIQNSQETEKTLEELSHTLKHTQIRMDREVNQLKQWVTTMMMSITKEEDTAAELELKARVFHFGEYKGDQQDKLLESLNCKVLDVYRHCTGTQQEANLGTVQMLTIIEHQLDELLENLEHVPQVKIEQAERAKEKERRIRLREEKLQMQKILQEEHLQRARARAQAEIKKKRGRTLVCRSRPPAHRIKQQSEHTLMDKEEEELLFFFT

SEQ ID NO: 4319 - protein, 416 aa, Homo sapiens
MGLIPHNGLSRPRFSLPAASPGPEPPQVGLSRPTCTLRASSPGPALPPGCVSRPDSCLPTTSLDSVPAHLLAALVGPQLPQAKLPRPRSGLTVASPGSAPALRWRLQAPNGLRPVGSSTPSLGLPATSAGPSRPEVGLSRPCLPASKQAFWLSSCPAPEELGCRNFGVYKRRRELSRKSLLAGRQELGREMQPGGTAGPAEAAMREAEAGPPQVGLSRPTCSLPASSPGPALPPGCVSRPNSGLPTRSLDSAPPQLPAALVGPQLPEAKLPRPSSGLTVASPGSAPALRQRLQAPNGLRSVGSSRPSLGLPAASAGPNRPEVGLSRPSSSLPAASAGLSRPQVGLEMGLEELQVGLPGPSSVLSAASPGAKLPRVSLSRPSSSCLSGLFRPSPAHGSRRSSQAPLLTFGGLFRPRT

SEQ ID NO: 4320 - protein, 131 aa, Homo sapiens
MPQAAHSVSAVLEKAQTHAETSKDKKPALGNRQEHSGPRTAPSPACPASSGAEVQGYQQQPRHAPPRPRTQAAGASPPCQTTSCRHSHHPWTTQSSRRPWTSCSLPPRSPRGLLMPHPRKRHEASMFRSSK

SEQ ID NO: 4321 - protein, 143 aa, Homo sapiens
MEPVFRYLAKEGCALAHLTLSANHLGDKAVRDLCRCLSLCPSLISLDLSANPEISCASLEELLSTLQKRPQGLSFLGLSGCAVQGPLGLGLWDKIAAQLRELQLCSRRLCAEDRDALRQLQPSRPGPGECTLDHGSKLFFRRL

SEQ ID NO: 4322 - protein, 170 aa, Homo sapiens
MHPGPSSGGTEGGVPTALRPPGPLVPSTSDDNLLKNIELFDKLALRFHGRLLFLKDVLGDEICCWSFYGQGRKIAEVCCTSIVYATEKKQTKVEFPEARIFEETLNILIYETPRGPDPALLEATGGAAGAGGAGRGEDEENREHRVRRIHVRRHITHDERPHGQQIVFKD

SEQ ID NO: 4323 - protein, 563 aa, Homo sapiens
MSSNLLPTLNSGGKVKDGSTKEDRPYKIFFRDLFLVKENEMAAKETEKFMNRNMKVYQKTTFSSRMKSHSYLSQLAFYPKRSGRSFEKFGPGPAPIPRLIEGSDTKRTVHEFINDQRDRFLLEYALSTKRNTIKKFEKDIAMRERQLKKAEKKLQDDALAFEEFLRENDQRSVDALKMAAQETINKLQMTAELKKASMEVQAVKSEIAKTEFLLREYMKYGFFLLQMSPKHWQIQQALKRAQASKSKANIILPKILAKLSLHSSNKEGILEESGRTAVLSEDASQGRDSQGKPSRSLTRTPEKKKSNLAESFGSEDSLEFLLDDEMDVDLEPALYFKEPEELLQVLRELEEQNLTLFQYSQDVDENLEEVNKREKVIQDKTNSNIEFLLEQEKMLKANCVREEEKAAELQLKSKLFSFGEFNSDAQEILIDSLSKKITQVYKVCIGDAEDDGLNPIQKLVKVESRLVELCDLIESIPKENVEAIERMKQKEWRQKFRDEKMKEKQRHQQERLKAALEKAVAQPKKKLGRQLVFHSKPPSGNKQQLPLVNETKTKSQEEEYFFT

SEQ ID NO: 4324 - protein, 415 aa, Homo sapiens
MKLKSLLLRYYPPGIMLEYEKHGELKTKSIDLLDLGPSTDVSALVEEIQKAEPLLTASRTEQVKLLIQRLQEKLGQNSNHTFYLFKVLKAHILPLTNVALNKSGSCFITGSYDRTCKLWDTASGEELNTLEGHRNVVYAIAFNNPYGDKIATGSFDKTCKLWSVETGKCYHTFRGHTAEIVCLSFNPQSTLVATGSMDTTAKLWDIQNGEEVYTLRGHSAEIISLSFNTSGDRIITGSFDHTVVVWDADTGRKVNILIGHCAEISSASFNWDCSLILTGSMDKTCKLWDATNGKCVATLTGHDDEILDSCFDYTGKLIATASADGTARIFSAATRKCIAKLEGHEGEISKISFNPQGNHLLTGSSDKTARIWDAQTGQCLQVLEGHTDEIFSCAFNYKGNIVITGSKDNTCRIWR

SEQ ID NO: 4325 - protein, 661 aa, Homo sapiens
MELFLIIGFTVIANKISMATETSQTLIDMIPYSFLLPVTPDFSLLPKIILQAFSLSLVSSFLLIFLGKKIASLHNYSVNSNQDLIAIGLCNVVSSFFRSCVFTGAIARTIIQDKSGGRQQFASLVGAGVMLLLMVKMGHFFYTLPNAVLAGIILSNVIPYLETISNLPSLWRQDQYDCALWMMTFSSSIFLGLDIGLIISVVSAFFITTVRSHRAKILLLGQIPNTNIYRSINDYREIITIPGVKIFQCCSSITFVNVYYLKHKLLKEVDMVKVPLKEEEIFSLFNSSDTNLQGGKICRCFCNCDDLEPLPRILYTERFENKLDPEASSVNLIHCSHFESMNTSQTASEDQVPYTVSSVSQKNQGQQYEEVEEVWLPNNSSRNSSPGLPDVAESQGRRSLIPYSDASLLPSVHTIILDFSMVHYVDSRGLVVLRQICNAFQNANILILIAGCHSSIVRAFERNDFFDAGITKTQLFLSVHDAVLFALSRKVIGSSELSIDESETVIRETYSEIDKNDNSRYKMSSSFLGSQKNVSPGFIKIQQPVEEESELDLELESEQEAGLGLDLDLDRELEPEMEPKAETETKTQTEMEPQPETEPEMEPNPKSRPRAHTFPQQRYWPMYHPSMASTQSQTQTRTWSVERRRHPMDSYSPEGNSNEDV

SEQ ID NO: 4326 - protein, 656 aa, Homo sapiens
MDAQQDRPKSQDSLGLLAPLASAAEVPSTAPVSGKKHRPPGPLFSSSDPLPATSYHSRDTAQVTSLIPATFTAASRDAGMRRTRSAPAAATAAPPPSTLNNTSGSLLNAVDGGPSHFLASATAAARAQRSEVRYNQRSQTSRTRSCLKRNASSSSSSHSSTEGLQELKRRRGPASSHCQLAHSSSNTVSEDGPQAVSSGHRCENKAGTAPGQTLAPRGGSPRSQASRPHINSALYVEDKAISDCRPSRPSHTLSSLATGASGGPPVSKAPTMDAQQDRPKSQDCLGLVAPLASAAEVPSTAPVSGKKHRPPGPLFSSSDPLPATSSHSRDSAQVTSLIPATFTAASRDAGMRRTRPGTSAPAAAAAALPPSTLNPTSGSLLNAVDGGPSHFLASATAAARAQRSEVRYNQRSQTSRTRSCLKRNASSSSHSSTEGLREVKRRRGPASSHCQLAHSSSNTVSEDGPQAVSSGHRCENKAGTAPGQTLAPRGGSPRSQASRPRINSALHVEDKAISDCRPSRPSHTLSSLATGASGGPPVSKAPTMDAQQDRPKSQDCLGLLAPLASAAEVFSTAPVSGKKHRPPGPLFSSSDPLPATSSHSGDSAQDTSLIPAPFTPASRDAGIRRMFRVRNCLRGLGLFLLVFSFFFLLTWASFSF

SEQ ID NO: 4327 - protein, 101 aa, Homo sapiens
MSTRYAAFADRRGTSRPRQARDAACSSNLPPAGPASSTLPGSLSSHPSPQNVRARTRKGEALSGSHRHNVTEQRGQSRVPFKLRVSEGKNRSYTYQASAMC

SEQ ID NO: 4328 - protein, 455 aa, Homo sapiens
MWPQPHLPPHPMMSEKTRQNKLAEAKKKFTDYRQWNIAGVGTGATDTKKKKINHGTNPETTTSGGCHSPEDTQQNRAQLKEEKKMREQEDVETGGEAAGAGEADVGAGGEDAGSGAEDVGPGGEDVGAGREAAAEGGENAGAEDVAAGGEDAGGEEDAGAGEEDMGPGEDARGGEHAGAGEEDAGGGGDDAGAGGEDAGAGRKDAGAGGGDVGAGGEDVGAGREDVGAAEATGTEGEAVGTREDAGAGEDMGAGGEDAGPGGEDAGPGGEDAGAGGEDAGAGGEDVGAGGEDVGAGGEDVGPGGEDVGAGGEDVGPGGEDAGGRRRRCGGRRRRCGARRRRCGGRRRRCGGQEEKMRGAGGEDAGDRRRRCGGQEEKMREQEEKMREQEEKMQGQEEKMREQEEKMRGQEEKMREQEEKMRGQEEKMWGQEEKMWGQEEKMWGQEEMMREKEERI

SEQ ID NO: 4329 - protein, 708 aa, Homo sapiens
METAMCVCCPCCTWQRCCPQLCSCLCCKFIFTSERNCTCFPCPYKDERNCQFCHCTCSESPNCHWCCCSWANDPNCKCCCTASSNLNCYYYESRCCRNTIITFHKGRLRSIHTSSKTALRTGSSDTQVDEVKSIPANSHLVNHLNCPMCSRLRLHSFMLPCNHSLCEKCLRQLQKHAEVTENFFILICPVCDRSHCMPYSNKMQLPENYLHGRLTKRYMQEHGYLKWRFDRSSGPILCQVCRNRRIAYKRCITCRLNLCNDCLKAFHSDVAMQDHVFVDTSAEEQDEKICIHHPSSRIIEYCRNDNKLLCTFCKFSFHNGHDTISLIDACSERAASLFSAIAKFKAVRYEIDNDLMEFNILKNSFKADKEAKRKEIRNGFLKLRSILQEKEKIIMEQIENLEVSRQKEIEKYVYVTTMKVNEMDGLIAYSKEALKETGQVAFLQSAKILVDQIEDGIQTTYRPDPQLRLHSINYVPLDFVELSSAIHELFPTGPKKVRSSGDSLPSPYPVHSETMTARKVTFSTHSLGNQHIYQRSSSMLSFSNTDKKAKVGLEACGRAQSATPAKPTDGLYTYWSAGADSQSVQNSSSFHNWYSFNDGSVKTPGPIVIYQTLVYPRAAKVYWTCPAEDVDSFEMEFYEVITSPPNNVQMELCGQIRDIMQQNLELHNLTPNTEYVFKVRAINDNGPGQWSDICKVVTPDGHGKNRAK

SEQ ID NO: 4330 - protein, 410 aa, Homo sapiens
MSLPESPHSPATLDYALEDPHQGQRSREKSKATEVMADMFDGRLEPIVFPPPRLPEEGVAPQDPADGGHTFHILVDAGRSHGAIKAGQEVTPPPAEGLEAASASLTTDGSLKNGFPGEETHGLGGEKALETCGAGRSESEVIAEGKAEDVKPEECAMFSAPVDEKPGGEEMDVAEENRAIDEVNREAGPGPGPGPLNVGLHLNPLESIQLELDSVNAEADRALLQVERRFGQIHEYYLEQRNDIIRNIPGFWVTAFRHHPQLSAMIRGQDAEMLSYLTNLEVKELRHPRTGCKFKFFFQRNPYFRNKLIVKVYEVRSFGQVVSFSTLIMWRRGHGPQSFIHRNRHVICSFFTWFSDHSLPESDRIAQIIKEDLWSNPLQYYLLGEDAHRARRRLVREPVEIPRPFGFQCG

SEQ ID NO: 4331 - protein, 530 aa, Homo sapiens [sequence omitted]

SEQ ID NO: 4332 - protein, 271 aa, Homo sapiens
MTTTQKHDLFTPEPHYVPGYAGFFPQLRYQVGNTYGRTTGQLLTDPSVQKSPCSVLSPMSKPKFIEDFSQSKPPRVPCQDLTEPYIPHYTSLKPSKNFEILGQLPPLEVDAQEPPGVENIPRQILLPAGFTPDTPHPPCPPGRKGDSRDLGHPVYGEEAWKSATPVCEAPRQHQLYHCQRDEYPPPARRQQETLDVGSFQRLPQLDHPNLIQRKAISEQASGLGGPPLPPSCFQEPSFSQDEAVPCLPVPIWPHQTVANVQGTKGSLAWLP

SEQ ID NO: 4333 - protein, 113 aa, Homo sapiens [sequence omitted]

SEQ ID NO: 4334 - protein, 550 aa, Homo sapiens [sequence omitted]

SEQ ID NO: 4335 - protein, 490 aa, Homo sapiens [sequence omitted]

SEQ ID NO: 4336 - protein, 535 aa, Homo sapiens [sequence omitted]

SEQ ID NO: 4337 - protein, 492 aa, Homo sapiens
MLEYLSLTFLISVKIQGDYIPRQVRTWVKQYRASETSTIPAMERLIEWLPLHLPRQQRTTVVHGDFRLDNLVFHPEEPEVLAVLDWELSTLGDPLADVAYSCLAHYLPSSFPVLRGINDCDLTQLGIPAAEEYFRMYCLQMGLPPTENWNFYMAFSFFRVAAILQGVYKRSLTGQASSTYAEQTGKLTEFVSNLAWDFAVKEGFRVFKEMPFTNPLTRSYHTWARPQSQWCPTGSRSYSSVPEASPAHTSRGGLVISPESLSPPVRELYHRLKHFMEQRVYPAEPELQSHQASAARWSPSPLIEDLKEKAKAEGLWNLFLPLEADPEKKYGAGLTNVEYAHLCELMGTSLYAPEVCNCSAPDTGNMELLVRYGTEAQKARWLIPLLEGKARSCFAMTEPQVASSDATNIEASIREEDSFYVINGHKWWITGILDPRCQLCVFMGKTDPHAPRHRQQSVLLVPMDTPGIKIIRPLTVYGLEDAPGCFLPSFSL

SEQ ID NO: 4338 - protein, 356 aa, Homo sapiens [sequence omitted]

SEQ ID NO: 4339 - protein, 374 aa, Homo sapiens [sequence omitted]

SEQ ID NO: 4340 - protein, 147 aa, Homo sapiens
MLDQMDLTDIDRTLYPKTIEYTFFSSAHGTYSKISHAIGLKQSSANKTKKKTEIIPTIPLDHRAIKVEIKTKNITQNHTITWKLNNLLLNDFWVNNEIRAEIKKFFETKANKATIYQNLWDIAKAVLRGKFIALNAHNKKKDLKLRT

SEQ ID NO: 4341 - protein, 745 aa, Homo sapiens [sequence omitted]

SEQ ID NO: 4342 - protein, 295 aa, Homo sapiens
MTEGVLPGLYLGNFIDAKDLDQLGRNKITHIISIHESPQPLLQDITYLRIPVADTPEVPIKKHFKECINFIHCCRLNGGNCLVHCFAGISRSTTIVTAYVMTVTGLGWRDVLEAIKATRPIANPNPGFRQQLEEFGWASSQKGARHRTSKTSGAQCPPMTSATCLLAARVALLSAALVREATGRTAQRCRLSPRAAAERLLGPPPHVAAGWSPDPKYQICLCFGEEDPGPTQHPKEQLIMADVQVQLRPGSSSCTLSASTERPDGSSTPGNPDGITHLQCSCLHPKRAASSSCTR

SEQ ID NO: 4343 - protein, 637 aa, Homo sapiens
MTKRKKLRTSGEGLCPPKPLKNPRLGDFYGDPQSSMLGCLHHPEEPEGKLGPVPSTQQHGEEPGKAVSSSPDEETGSPCRLLRQPEKEPAPLPPSQNSFGRFVPQFAKSRKTVTRKEEMKDEDRGSGAFSLETIAESSAQSPGCQLLVETLGVPLQEATELGDPTQADSARPEQSSQSPVQAVPGSGDSQPDDPPDRGTGLSASQRASQDHLSEQGADDSKPETDRVPGDGGQKEHLPSIDSEGEKPDRGAPQEGGAQRTAGAGLPGGPQEEGDGVPCTPASAPTSGPAPGLGPASWCLEPGSVAQGSPDPQQTPSRMGREGEGTHSSLGCSSLGMVVIADLSTDPTELEERALEVAGPDGQASAISPASPRRKAADGGHRRALPGCTSLTGETTGESGEAGQDGKPPGDVLVGPTASLALAPGSGESMMGAGDSGHASPDTGPCVNQKQEPGPAQEEAELGGQNLERDLEGFRVSPQASVVLEHREIADDPLQEPGAQQGIPDTTSELAGQRDHLPHSADQGTWADSLAVELDFLLDSQIQDALDASDFEAPPEQLFPSGNKPGPCWPGPSSHANGDPVAVAKAQPSRLIMGTHRDLEAFKRLNYRKTKLGGKAPLPYPSKGPGNIPRGDPPWREL

SEQ ID NO: 4344 - protein, 466 aa, Homo sapiens
MWPQPRLPPHPAMSEKTQQGKLAAAKKKLKAYWQRKSPGIPAGANRKKKINGSSPDTATSGGYHSPGDSATGIYGEGRASSTTLEDLESQYQELAVALDSSSAIISQLTENINSLVRTSKEEKKHEIHLVQKLGRSLFKLKNQTAEPLAPEPPAGPSKVEQLQDETNHLRKELESVGRQLQAEVENNQMLSLLNRRQEERLREQEERLREQEERLREQEERLHEQEERLCEQEERLCEQEERLREHEERLCEQEERLREHEERLCEQEERLCEQEERLREQEERLCEQEERLCEQEERLCEQEERLREQEERLCEQEERLREQEERLCEQEERLREQEERLCEQEERLREQEERLCEQEKLPGQERLLEEVEKLLEQERRQEEQERLLERERLLEEVEKLLEQERRQEEQERLLERERLLEEVEKLLEQERRQEEQERLLERERLLDEVEELLDEVEELLEQERLR

SEQ ID NO: 4345 - protein, 691 aa, Homo sapiens
MDGCKKELPRLQEPEEDEDCYILNVQSSSDDTSGSSVARRAPKRQASCILNVQSRSGDTSGSSVARRAPKRQASSVVVIDSDSDEECHTHEEKKAKLLEINSDDESPECCHVKPAIQEPPIVISDDDNDDDNGNDLEVPDDNSDDSEAPDDNSDDSEAPDDNSDDSEAPDDNSDDSEAPDDNSDDSDVPDDNSDDSSDDNSDDSSDDNSDDSDVPDDKSDDSDVPDDSSDDSDVPDDSSDDSEAPDDSSDDSEAPDDSSDDSEAPDDSSDDSEAPDDSSDDSEASDDSSDDSEASDDSSDDSEAPDDKSDDSDVPEDKSDDSDVPDDNSDDLEVPVPAEDLCNEGQIASDEEELVEAAAAVSQHDSSDDAGEQDLGENLSKPPSDPEANPEVSERKLPTEEEPAPVVEQSGKRKSKTKTIVEPPRKRQTKTKNIVEPPRKRQTKTKNIVEPLRKRKAKTKNVSVTPGHKKRGPSKKKPGAAKVEKRKTRTPKCKVPGCFLQDLEKSKKYSGKNLKRNKDELVQRIYDLFNRSVCDKKLPEKLRIGWNNKMVKTAGLCSTGEMWYPKWRRFAKIQIGLKVCDSADRIRDTLIHEMCHAASWLIDGIHDSHGDAWKYYARKSNRIHPELPRVTRCHNYKINYKVHYECTGCKTRIGCYTKSLDTSRFICAKCKGSLVMVPLTQKDGTRIVPHV

SEQ ID NO: 4346 - protein, 705 aa, Homo sapiens
MLREEAAQKRKGKEPGMALPQGRLTFRDVAIEFSLAEWKCLNPSQRALYREVMLENYRNLEAVDISSKCMMKEVLSTGQGNTEVIHTGTLQRHESHHIGDFCFQEIEKEIHDIEFQCQEDERDGLEAPMTKIKKLTGSTDQHDHRHAGNKPIKDQLGSSFYSHLPELHIFQIKGEIGNQLEKSTNDAPSVSTFQRISCRPQTQISNNYGNNPLNSSLLPQKQEVHMREKSFQCNKSGKAFNCSSLLRKHQIIHLGDKQYKCDVCGKLFNHEQYLACHDRCHTVEKPYKCKECGKTFSQESSLTCHRRLHTGVKRYNCNECGKIFGQNSALLIDKAIDTGENPYKCNECDKAFNQQSQLSHHRIHTGEKPYKCEECDKVSSRKSTIETHKRIHTGEKPYRCKVCDTAFTWHSQLARHRRIHTAKKTYKCNECGKTFSHKSSLVCHHRLHGGEKSYKCKVCDKAFVWSSQLAKHTRIDCGEKPYKCNECGKTFGQNSDLLIHKSIHTGEQPYKCDECEKVFSRKSSLETHKIGHTGEKPYKCKVCDKAFACHSYLAKHTRIHSGEKPYKCNECSKTFSHRSYLVCHHRVHSGEKPYKCNECSKTFSRRSSLHCHRRLHSGEKPYKCNECGNTFRHCSSLIYHRRLHTGEKSYKCTICDKAFVRNSLLSRHTRIHTAEKPYKCNECGKAFNQQSHLSRHHRIHTGEKP

SEQ ID NO: 4347 - protein, 514 aa, Homo sapiens
MGDSGSRRSTLVSRLPIFRRSINRRHDSLPSSPSSSNTVGVHSSSPSSTNSSSGSTGKRRSIFRTPSISFHHKKGSEPKQEPTNQNLSISNGAQPGHSNMQKLSLEEHIKTRGRHSVGFSSSRNKKITRSLTEDFEREKEHSTNKNVFINCLSSGKSEGDDSGFTEDQTRRSVKQSTRKLLPKSFSSHYKFSKPVLQSQSISLVQQSEFSLEVTQYQEREPVLVRASPSCSVDVTERAGSSLQSPLLSADLTTAQTPSEFLALTEDSVSEMDAFSKSGSMASHCDNFGHNDSTSQMSLNSAAVTKTTTELTGTVPCAIMSPGKYRLEGQCSTESNSLPETSAANQKEVLLQIAELPATSVSHSESNLPADSEREENIGLQNGETMLGTNSPRKLGFYEQHKAIAEHVKGIHPISDSKIIPTSGDHHIFNKTSHGYEANPAKVLASSLSPFREGRFIERRLRSSSEGTAGSSRMILKPKDGNIEEVNSLRKQRAGSSSSKMNSLVSIYICLPLIK

SEQ ID NO: 4348 - protein, 260 aa, Homo sapiens
MGVWLTPLCESLCLLLPGLPQPFSFLSSLLALWLNEDLLEDFWAILSPLVLWRLSPVLRRWELLPRALSFSLLSLPSLQPSALAWVRSLPCCPLRLLLLCRVETGGPAAASMSASAAVLLVSTTPAMARLTLPSRERLMDALETCSEDLPAAPATATFVLFGAMLAVPARAMLPLFPPAPMVAAPAMAALTCPGAELAAATLKAPATVPVAAPAAAPAAAASLIPPVAGSSASSVDVLGMDALSTLVGLLKSFWSPSPPA

SEQ ID NO: 4349 - protein, 253 aa, Homo sapiens
MQAVSQIRLNREHKETCEMDWSDKMEAYNIDETCGRHHSQSTEVQAHPYSTTFQESASTPETRAKFTQDNLCRAQRERLASANLRVLVDCILRDTSEDLRLQCDAVNLAFGRRCEELEDARYKLHHHLHKTLREITDQEHNVAALKQAIKDKEAPLHVAQTRLYLRSHRPNMELCRDAAQFRLLSEVEELNMSLTALREKLLEAEQSLRNLEDIHMSLEKDIAAMTNSLFIDRQKCMAHRTRYPTILQLAGYQ

SEQ ID NO: 4350 - protein, 370 aa, Homo sapiens
MDLWNWDEASPQEVPPGNKLAGLGRLPRLPQRVWGGCPGGASADPNPLSPAEGAKLGFCFPDLALQGDTPTATAETCWKGTSSSLASFPQLDWGSALLHPEVPWGAEPDSQALPWSGNWTDMACTAWDSWSGASQTLGPAPLGPGPIPAAGSEGAAGQNCVPVAGEATSWSRAQAAGSNTSWDCSVGPDGDTYWGSGLGGEPRTDCTISWGGPAGPDCTTSWNPGLHAGGTTSLKRYQSSALTVCSEPSPQSDRASLARCPKTNHRGPIQLWQFLLELLHDGARSSCIRWTGNSREFQLCDPKEVARLWGERKRKPGMNYEKLSRGLRYYYRRDIVRKSGGRKYTYRFGGRVPSLAYPDCAGGGRGAETQ

SEQ ID NO: 4351 - protein, 570 aa, Homo sapiens
MVKTNKPGAKVAVSAQRGSEVTTNTSPQQGHGYVLASSHRSAAVSLNPSHRRSEAAHPTTPHSASDYPRSVSLQSGPGHYAVPTPRGTETGPRTESSRHSSPHLKSQKTQTLASHASSRQWKVSPPREEAARRGSESKSGREVGHHASSIPDAKSTHQLSFQDQKNNLQSQILEDDPPSKVQNPQGARVPRRILSYPKDEAVQTEPIQRITTTSEIRSPRSPSLLEHGSSCVSADYQTAQRRVPVEESETGPYGPIPSKPKALYRNMNLDSLLKLSVLKDSDGVHRVSARVDPESLHKYSAYPETKPSAKVLVSSQVESNVRTPIRGNSEVGRRVTISPGVQSVEPTHHVTVPSVSEGSHKSSMFVTPEPIYKQQTQKPPEITYMSQGPTPRYPELSQKPSIHAELELTPRPLPPRSLPRYGPDSSWWPLLNPEVETPQSQLTTPDFEPKCSPSLDLLLSGFKIDSSPFCEDLKFQREKASLSPPSPPKEFPSWAPLSEVPQTPKHTCKQPIQRFTAFFLDVSEEMYNRVIWWLKGLCFSLLWAHCGSLGDGRTGEEWHLCIYRAGSFRR

SEQ ID NO: 4352 - protein, 114 aa, Homo sapiens [sequence omitted]

SEQ ID NO: 4353 - protein, 120 aa, Homo sapiens
MRHTRAGQLWGSFQRGAEIRLPGGAPGPGGAPQCDWVKCFQRTRVEVGGISSRPCRHLPPEPKGPSFLPPRWKCWGCPQSPSEHSHITPYLEIFLTLTFLPAAPSAPSPGSGLSLSSSTL

SEQ ID NO: 4354 - protein, 119 aa, Homo sapiens
MTNFRNSLKTKVSDLTEKLEERIYQIYNDHNKIIQEKLQEFTQKMAKISHLETELKQVCHSVETVYKDLCLQPESLRLRWGPDHSRGKSPPRPGNSQPPDVFVSSVAETTSQVVTSKPA

SEQ ID NO: 4355 - protein, 340 aa, Homo sapiens
MEDAHCTWLSLPGLPPGWALFAVLDGHGGARAARFGARHLPGHVLQELGPEPSEPEGVREALRRAFLSADERLRSLWPRVETGGCTAVVLLVSPRFLYLAHCGDSRAVLSRAGAVAFSTEDHRPLRPRERERIHAAGGTIRRRRVEGSLAVSRALGDFTYKEAPGRPPELQLVSAEPEVAALARQAEDEFMLLASDGVWDTVSGAALAGLVASRLRLGLAPELLCAQLLDTCLCKVLGAWRGTFGAWCSRGREPRGFGEEGFDREARVKLAKEGIGLKRRAWPEVGRAKIQGRSLRDALRHGRVSGRDLRERAWSFGKGRFWVVGAGPEVLISAGRWKSR

SEQ ID NO: 4356 - protein, 394 aa, Homo sapiens
MNRDIKMPLRKHNLELTMSPHCVPSKLCLDDTETNVNCQRLSSKEDLGPVQSQGMDSYSMLHPQFSKIENCSFTPSSFSVELPSNRHISKLNFTSGIAPTPQKLAYEKKQNDQRSTVNCSDSLLSKLNKSQDVFSPSHKTTRFGTLFERLNSLGNRNLLTKSPAVIMDEDCRSTDEIRQSDYITEKHSIQHIWGKNGKEVSNFLEDVNQSTPNLLSENCDSFVSQNMINVLNIDEQRIKKTFNKCDYDSMGDTCVVTSSDKNHVTDRCIRNIFTVPELTFSNSTLNKTSYPEKCQPNKKYQREYNKNERNDLSTSFENDYYPSSSERKEKFENDYQEKTPQKSIQKYPANSIWCTKCSEFKVIFTLIHYVLMLNLFLKSLRTAFQAFLNNDLQL

SEQ ID NO: 4357 - protein, 106 aa, Homo sapiens
MGCEAHSTCVWLGPTLTALQELTSIYRKWEGPKDWPMTPQEAEGTSGVGGSLWPTYPVPLTTYPVPITRCWQETREMAQTGDLGTYLPSATWVLGQSHHREKTFLR

SEQ ID NO: 4358 - protein, 120 aa, Homo sapiens [sequence omitted]

SEQ ID NO: 4359 - protein, 114 aa, Homo sapiens [sequence omitted]

SEQ ID NO: 4360 - protein, 127 aa, Homo sapiens
MDGDIDVYKHFSWLKRSQVNHHSAASNETYQERLARLEGDKESLILQELLSRTSLETQKLDLMTEVSELKLKLVGMEKEQREQEEKQRKAELTVTLCVSPYNCTSPPHVCMTRREYSSNCVPLGQSL

SEQ ID NO: 4361 - protein, 569 aa, Homo sapiens [sequence omitted]

SEQ ID NO: 4362 - protein, 225 aa, Homo sapiens
MHTIHTHTTHTIHTQHITYHSHNPHSPTIHNTHTHHSHTHTIWTHHTHTTHTTHINSYKAFTHTTHTPLTSTHLHTPLTHTPRTHITHHSQTQHTLLIHQSYTHTPTHHTQHKPHMHTPFTSINTPCIHHTHAPLTEISPHKPLKPTYTPHTHHKHTSHYSYTYHRHLSHTTHTHTHTPRTHKPHTPPTPDLTGNNFLLADGRRNSPRSGSSVYSFVVWNHHTLQ

SEQ ID NO: 4363 - protein, 111 aa, Homo sapiens [sequence omitted]

SEQ ID NO: 4364 - protein, 189 aa, Homo sapiens
MVGILPLCCSGCVPSLCCSSYVPSVAPTAAHSVRVPHSAGHCGQRVLACSLPQVFLKPWIFVEHFSSWLSLELFSFLRYLGTLLCACGHRLREGLLLPCLLGVGSWLLFNNWTGGSWFSLHLQQVSLSQGSHVAAFLPEAIGPGVPVPVSGESTSAQQSHAGWQLSAEADACPSVLYSEVLEWNKNINT

SEQ ID NO: 4365 - protein, 330 aa, Homo sapiens
MDGSMRPRSASLVDFQFGVVATETIEDALLHLAQQNEQAVREASGRLGRFREPQIVEFVFLLSEQWCLEKSVSYQAVEILERFMVKQAENICRQATIQPRDNKRESQNWRALKQQLVNKFTLRLVSCVQLASKLSFRNKIISNITVLNFLQALGYLHTKEELLESELDVLKSLNFRINLPTPLAYVETLLEVLGYNGCLVPAMRLHATCLTLLDLVYLLHEPIYESLLRASIENSTPSQLQGEKFTSVKEDFMLLAVGIIAASAFIQNHECWSQVVGHLQSITGIALASIAEFSYAILTHGVGANTPGRQQSIPPHLAARALKTVASSNT

SEQ ID NO: 4366 - protein, 137 aa, Homo sapiens
MGWVIPEWPGAQSCPTAAQVAQPVPFMCNAPASPINDKEKDKAGGRLPSGSEPRARAFCEAGADGEQGDPSPADTIKANQGHIPAAPGETGSVICWCDQSVAPPRPAGLSVSGRQSYLVGCFRWVLTFFFSVFYLTP

SEQ ID NO: 4367 - protein, 242 aa, Homo sapiens
MGTGASEKQAEQKVRRAFEASEEAHGTLAASTPWVAMGSAYGSCTCLGAQPVTDLALWPVIYSCMGFSPQAYPAFWAYPWVLYGGYLWMGYPPPAALVPSVWLYWRGASSFDPLIGSPYLAALAPNLFPFPMKFPPTYSLASPTLGGATSSHCPQVGCWTPASSAPRAAVEGPSRGAPYLKTCKAPPSEWASRFGIWAPLPCCSSELRPLPPSPIEDSQLDPGCSRSSSRSPCRARRRLFEC

SEQ ID NO: 4368 - protein, 135 aa, Homo sapiens
MFQNLQGTFEKEIGKIIPFTIAFKRAEAVEPDGCVQSWRCCLPCDLGQASRFIHTTVCSAIRWRSCKGERNFAERHILPAELEEQSNHAGMGPILPAMPSVDGNHFQHPAGDCHPYGILCLQAHSASVTARQVLQ

SEQ ID NO: 4369 - protein, 184 aa, Homo sapiens
MIHCEATHCGKILSNKQSFIHYVNVETGEKTYVCVECGKSFLKKSQIIIHQRIHTGEKPYDCGACGKAFSEKSHLIAHQRTHTGEKPYDCSECGKGFSQKSSLIIHQRVHTGEKPYECSECEKAFSQKSPLIIHQRIHTGEKPYECRVWESLFPESQLIIHHRAHTGEKPCKCTECGKAFCFIH

SEQ ID NO: 4370 - protein, 209 aa, Homo sapiens
MLSSQLCCVHSLPPTANPAALCSLAQQMFTNIRSPCSGPQGSPGLPRRTHIHLWPHSAHMYFLVTSSLLPFPLIQPGCSRTRFKTLCSLRHTSAPTEEGHGPVRRPCGMHCLSHLPHPRGRPQGHPTHMRPALQQALLSHPSLLLPWRSSPDSAVQVGPSMILRRIPMAGHLCFPHWPQLLDSRDCCTYTCINTPVLNSHMVQEGVCGQ

SEQ ID NO: 4371 - protein, 137 aa, Homo sapiens
MAMRSRGPWALPARWAAPRGPLPSGQLGTTAGVMGHPGGSEPQQPGEPRGCASGGGGGRGRRPPAPCFAVRGPAPECPQGSAAPCAQPCPKSPLPPHPGPKRNKHPECLWRCAFLGGREGWRGGGQAPLRVPQLPSP

SEQ ID NO: 4372 - protein, 111 aa, Homo sapiens
MEAGDSFNTQNEPEDMMKKEKKSEALNIRGVLLHVMGDALGSVVVVITAIIFYVLPLKSEDPCNWQCYIDPSLTVLMVIIILSSAFPLIKETAAILLQMVPKGVNMEELIW

SEQ ID NO: 4373 - protein, 604 aa, Homo sapiens
MDGVKHIARALRNVWQWLLHIGDVCNSELGNPYLKCARVFDDAKDSCMMVIPQAYHLCYVLMPFKLALCGLASLVQVFCVIPKYIQPFLRQTIGTPVIQLLNRVRQEFEFNMTATHHFSVDLNASRSLSQVAMDLHEAVSMKLHRVREALALMGFTTPLLLVLLYLQALFYRYCYLNWDHYDNIYITSRFLRMEAVRSTAGLPTVLPLSAHEARRYIPPGSIFLSQWEKFFYILETFNLIRHLLLVLFLVFLDYAVFWVLDLARHQLQGEIVARSPVLVSLTVEGTGYAGNIYRDLVSAFDVLQQGNISILSRRCLLRPSEPDSTGYIVIGVMYGLCFFITLFGSYVSRLRRVICASYYPSREQERISYLYNVLLSRRTNLLAALHRSVRRRAADQGHRSAFLVLASRCPCLGPFVSHFWLHQAYCLGCGQPQDEGDMENTVSCSTPGCQGLYCLTCFRLLDNTCSVCASPLSYQGDLDLELDSSDEEGPQLWLAAAQRKDPEQAWLLQQQLQEVLGRSLSMESTSESSDLDEEKGPQQRKHGQQPLPEAHQPVSILTSPEPTDHLRHPPPLKEPPLQLQNPQSLSHLPLFLILPTHPPNKPKV

SEQ ID NO: 4374 - protein, 129 aa, Homo sapiens
MKDLLLLGSPFQRFPVPAPFVTSYKVLAYTAKFGIHSLQNPTAPENSLACLRLLGYSRFQITCFLSVPGWLRTPVGSEIPSKVPAVGRFELSSWTPNTHSPPGSSRLQMTCLLSVPGLRSDTCRIVNPK

SEQ ID NO: 4375 - protein, 100 aa, Homo sapiens
MVPTATAFLFSRSGSFMFWIIQERDRGGRLVRLINNLFSTTWLNVELFRLTRNLYSLTNSLRVLVSLCCPGWSAVARLAHCNLHLLGSSDPPISSSRSWD

SEQ ID NO: 4376 - protein, 126 aa, Homo sapiens
MAAVPAPIDLDDADSVEQTTVTLADTPHADPGLQPDCCPFLLHIELQHHPPPLCQQLLQHLPPPALNDPSPEGCMQQCASHQHAPPPGLDENSCRPFCHDGLLFWALQEKTDTLRVCQEGALILYQ

SEQ ID NO: 4377 - protein, 140 aa, Homo sapiens [sequence omitted]

SEQ ID NO: 4378 - protein, 338 aa, Homo sapiens
MAGSHPYFNQPDSTHPSPPSAPPSLRWYQRCQPSDATSGLLVALLGGGLPAGFVGPLSRMAYQASNLPSLELLIWRCLFHLPIALLLKLRGDPLLGTPDIRSRAFFCALLNILSIGCAYSAVQVVPAGNAATVRKGSSTVCSAVLTLCLESQGLSGYDWCGLLGCILGLIIIVGPGLWTLQEGTTGVYTALGYVEAFLGGLALSLRLLVYRSLHFPPCLPTVAFLSGLVGLLGSVPGLFVLQAPVLPSDLLSWSCVGAVGILALVSFTCVGYAVTKAHPALVCAVLHSEVVVALILQYYMLHETVAPSDIVAAGVVLGSIAIITAQNLSCERTGRVEE

SEQ ID NO: 4379 - protein, 120 aa, Homo sapiens
MSTNCIFRTIESSSDINVKTLSASNRYPVPKPPRHCQVLVTALPFSEPKSLLACSGFQSTGTHTRGLKAKETHCRRVVRSRSPKSECCQGQPTPRAVKGALPCLFLLLVTPGITHPVDGS

SEQ ID NO: 4380 - protein, 584 aa, Homo sapiens [sequence omitted]

SEQ ID NO: 4381 - protein, 425 aa, Homo sapiens
MAGAEGAAGRQSELEPVVSLVDVLEEDEELENEACAVLGGGDSEKCSYSQGSVKRQALYACSTCTPEGEEPAGICLACSYECHGSHKLFELYTKRNFRCDCGNSKFKNLECKLLPDKAKVNSGNKYNDNFFGLYCICKRPYPDPEDEIPDEMIQCVVCEDWFHGRHLGAIPPESGDFQKMVCQACMKRCSFLWAYAAQLAVTKISTEDDGLVRNIDGIGDQEVIKPENGEHQDSTLKEDVPEQGKDDVREVKVEQNSEPCAGSSSESDLQTVFKNESLNAESKSGCKLQELKAKQLIKKDTATYWPLNWRSKLCTCQDCMKMYGDLDVLFLTDEYDTVLAYENRGKIAQATDRSDPLMDTLSSMNRVQQVELICEYNDLKTELKDYLKRFADEGTVVKREDIQQFFEEFQSKKRRRVDGMQYYCS

SEQ ID NO: 4382 - protein, 134 aa, Homo sapiens
MLSDFKLYYKATVSKAAWYWYQNRHIGQWNRTETSKGTSHIYNHLFFDKSDKNKQWRKDLLFNTWYWENWLAICRKLKLDPFLKPSTKINSRWINDLNVKPKTIKTLEENLGNHRDGQRLREENAKSNCNKSQN

SEQ ID NO: 4383 - protein, 389 aa, Homo sapiens
MYGRPQAEMEQEAGELSRWQAAHQAAQDNENSAPNLNMSSSSGSSGVHTSWNQGLPTIQHFPHSAEMLGSPLVSVEAPGQNVNEGGPQFSMPLPERGMSYCPQATLTPSRMIYCQRMSPPQQEMTIFSGPQLMPVGEPNIPRVARPFGGNLRMPPNGLPVSASTGIPIMSHTGNPPVPYPGLSTVPSDETLLGPTVPSTEAQAVLPSMAQMLPPQDAHDLGMPPAESQSLLVLGSQDSLVSQPDSQEGPFLPEQPGPAPQTVEKNSRPQEGTGRRGSSEARPYCCNYENCGKAYTKRSHLVSHQRKHTGERPYSCNWESCSWSFFRSDELRRHMRVHTRYRPYKCDQCSREFMRSDHLKQHQKTHRPGPSDPQANNNNGEQDSPPAAGP

SEQ ID NO: 4384 - protein, 222 aa, Homo sapiens [sequence omitted]

SEQ ID NO: 4385 - protein, 608 aa, Homo sapiens
MEESGMAHESAEDLFHFNVGGWHFSVPRSKLSQFPDSLLWKEASALTSSESQRLFIDRDGSTFRHVHYYLYTSKLSFSSCAELNLLYEQALGLQLMPLLQTLDNLKEGKHHLRVRPADLPVAERASLNYWRTWKCISKPSEFPIKSPAFTGLHDKAPLGLMDTPLLDTEEEVHYCFLPLDLVAKYPSLVTEDNLLWLAETVALIECECSEFRFIVNFLRSQKILLPDNFSNIDVLEAEVEILEIPALTEAVRWYRMNMGGCSPTTCSPLSPGKGARTASLESVKPLYTMALGLLVKYPDSALGQLRIESTLDGSRLYITGNGVLFQHVKNWLGTCRLPLTETISEVYELCAFLDKRDITYEPIKVALKTHLEPRTLAPMDVLNEWTAEITVYSPQQIIKVYVGSHWYATTLQTLLKYPELLSNPQRVYWITYGQTLLIHGDGQMFRHILNFLRLGKLFLPSEFKEWPLFCQEVEEYHIPSLSEALAQCEAYKSWTQEKESENEEAFSIRRLHVVTEGPGSLVEFSRDTKETTAYMPVDFEDCSDRTPWNKAKGNLVRSNQMDEAEQYTRPIQVSLCRNVKRAGNPSTYSHCRGLCTNPGHWGSHPESP

SEQ ID NO: 4386 - protein, 396 aa, Homo sapiens
MFLLPEGVLIQTPRDTRNNSSCADVLAEEGEVHVALCRGQGGTPADKPQREWHNSWQVVAMAALGGLILSDVYPFSCKAVAGYKCTGYRSQDKSFHVEGALNHIFTRSLPFEGSQPRIFRIKLGNQWFSFPEPEALVGKLNRGFLEAPSCHPIKTINEKLIAELGKVFPLKRLKCSYPLLPQEGTSVLPFWNCDFLSAAFWISLHEDNSNSESLTGGTSQDVEDFLVSFSELSLLKNPGRDGKEEACEGTCGQAKICLRPSLLVHVQDVIEVPDFLSGSLHILSGPVFQKCHILPFTMPAFHETLFILGVNQNLKDGCLQSLLDHLKGILDSLLTQTLPESSKLSSLVKFVLQSNGKDYMIRVKTHNFSPDCTEDLIIGSVITSATSVIHKDQCFV

SEQ ID NO: 4387 - protein, 506 aa, Homo sapiens [sequence omitted]

SEQ ID NO: 4388 - protein, 136 aa, Homo sapiens
MWLDTRNLGIVISCWKGVCVPQTTTLEMFYNDNDRVEESSNSYQIRREFLLPACLPAFLSFSTSFSFFLSFLPLSLSLFLPFFPSFFLSLSLSPSFLPSFLRQGLALSPRLECDGAIMIHCSLNIPGSSDPPASAS

SEQ ID NO: 4389 - protein, 416 aa, Homo sapiens
MPLYNDSFHEISHKGRRHTLVLKSIQRADAGIVRASSLKVSTSARLEVRVKPVVFLKALDDLSAEERGTLALQCEVSDPEAHVVWRKDGVQLGPSDKYDFLHTAGTRGLVVHDVSPEDAGLYTCHVGSEETRARVRVHDLHVGITKRLKTMEVLEGESCSFECVLSHESASDPAMWTVGGKTVGSSSRFQATRQGRKYILVVREAAPSDAGEVVFSVRGLTSKASLIVRERPATIIKPLEDQWVAPGEDVELRCELSRAGTPVHWLKDRKAIRKSQKYDVVCEGTMAMLVIRGASLKDAGEYTCEVEASKSTASLHVEEKANCFTEELTNLQVEEKGTAVFTCKTEHPAATVTWRKGLLELRASGKHQPSQEGLTLRLTISALEKADSDTYTCDIGQAQSRAQLLVQGEAAKCARA

SEQ ID NO: 4390 - protein, 129 aa, Homo sapiens
MKDLLLLGSPFQRFPVPAPFVTSYKVLAYTAKFGIHSLQNPTAPENSLACLRLLGYSRFQITCFLSVPGWLRTPVGSEIPSKVPAVGRFELSPWTPNTHSPPGSSRLQMTCLLSVPGLRSDTCRIVNPK

SEQ ID NO: 4391 - protein, 177 aa, Homo sapiens
MDQPAVATASTSIREDLVGGESFITASKPAQKTSSFEREGWWRIALTDTPIPGTYHLKTFIEESLLNPVIATYNFKNEGRKKPPLVQRNNPVLNDLPQYMPPDFLDLLKKQVATYSFKDKPRPSPSTLVDKDQSLQLSPGQYNVLPAPVPKYASRSCVFRSTVQRFPTTYFIPVSIM

SEQ ID NO: 4392 - protein, 112 aa, Homo sapiens
MNLSTQAFRHKDENNNRPCPRETPRPTGEGGECQQTGPLSSVPAVGTGLHRTTLTPAATSLMPDKNRVKGDPHLSFLGLGLHPAVPSKNTTHRHTPIDTCILPLLGEKEKKK

SEQ ID NO: 4393 - protein, 107 aa, Homo sapiens
MYVHVYECTCMCMNVRACVHTCGMCGCACECAHTCIVCMSVHKCEGVCECMHVYVHWVDLYMYVHTCVCGPTCAYVHGVHMCLRWRERFSWAPSMPSRFPASESMIQ

SEQ ID NO: 4394 - protein, 728 aa, Homo sapiens
MAQIQKDKANISEKSVMHPEYIAVKAEKSPLSHILKTKELQVNISQQGEKAQEGEVEIVVLLSKTCPFVTSSAFLELDSIKEEEGEPRITRSFMPHLEIQESLPSRQTAPTKPTESLVKKEKQLLPQKEDRVQTVSMHGLMHPNGAVFKAKTSAPPQVFSITEHSPLSKRKEPQWGMKERAGQKQDRTGRPHVILTKTHPFMPSLSHHRFSPSQPKLPISSGAGKSRLANSNEGISSHKVILKANQQMPYKEAKDRVKIEGREGRILPKRIHLRAEALPLALLCNGKNYSLHIEEQGEGVQESKKEPGVVPRKPASFPPPPFYLNCDTRRNEKEGTLGKTQFSFPPLKIQDSSDSGKKAYTESLHGYTLSNSKGPVQPTAQGEEKGGLRIDMEDKMLPKCTDLKAKQLLLSDILNTKKLQWKSKEQKRKIQEDKNKQVKGLPSINTSLLTPPYLKFDTTEGQENVIRIAKVSLPQSRSKESSDAGRIACPEATHGELSSDVKQLKAHLLQKEEKDREKVADMTSVLDPNKMYLKAKKSPVLHTHSFSDLQWKTREQEEEKVQKVKSGPGVMLSKSPSRSSPLHLNVNTGFQEESIPILTRPSFPLVKLQVSPDTEGGTCIRPIAGDILIYLQKGKHVSQNKEEDDVQIVSILIFPKHQEEKVQECEGEPGVVLTKSTSLPSLSQLELDKETHLGNEMLRLKRPILRRISHIGETVHRESVVGDIPKDV

SEQ ID NO: 4395 - protein, 122 aa, Homo sapiens
MTLHRSHRALAEQAPSVSSGLQHSYEKKPAGALPTHMERLPGRFQSGKVRGNTGGPVCPAPTVKTNPADGDSSLLLCRSSLPSASRCSPPATFRTPGSPLDSVAKGFMCSEGDLQESVHRMP

SEQ ID NO: 4396 - protein, 157 aa, Homo sapiens [sequence omitted]

SEQ ID NO: 4397 - protein, 226 aa, Homo sapiens
MPGFLSFLSVSLRSPGSGIASSFPGQPATDPVGRRAAKAQLEAQFMAAWGKKHAGKDPVRDECEERNRFTETREEDVTDEHGEREPFAETDEHTGANTKKPEDTAVGANNFKNYPVHIGVSSEQHILLDCSLSRQKRDYIHSLKLLNVLEEYITDEQKEEEEEEGEEEELIRIFQEQQKKWQQYRSVRRERLKEMKLLRDQFVKALEDFEDLCDRVFSDEDSELDN

SEQ ID NO: 4398 - protein, 764 aa, Homo sapiens [sequence omitted]

SEQ ID NO: 4399 - protein, 609 aa, Homo sapiens [sequence omitted]

SEQ ID NO: 4400 - protein, 114 aa, Homo sapiens [sequence omitted]

SEQ ID NO: 4401 - protein, 581 aa, Homo sapiens
MCNTKLKRPNQERRNLVPSSQPMTENAPDRAKKGDPSAPSQSELHPALSQAFQGKNSPQVLSEFSGPPLTPTTVGGPRKASFRFRDEDFYSILSLNSRRESDDTEEETQSEECLWVGVRSPCSPSHHKRSRSGGTSTPQAKNKNFEENAENCRGHSSRRSEPSHGSLRISNAMEPATERPSAGQRLSQDPGLPDRESATEKDRGGSENAKKSPLSWDTKSEPRQEVGVNAENVWSDCISVEHRPGTHDSEGYWKDYLNSSQNSLDYFISGRPISPRSSVNSSYNPPASFMHSALRDDIPVDLSMSSTSVHSSDSEGNSGFHVCQPLSPIRNRTPFASAENHNYFPVNSAHEFAVREAEDTTLTSQPQGAPLYTDLLLNPQGNLSLVDSSSSSPSRMNSEGHLHVSGSLQENTPFTFFAVSHFPNQNDNGSRMAASGFTDEKETSKIKADPEKLKKLQESLLEEDSEEEGDLCRICQIAGGSPSNPLLEPCGCVGSLQFVHQECLKKWLKVKITSGADLGAVKTCEMCKQGLLVDLGDFNMIEFYQKYQQSQAQNELMNSGLYLVLLLHLYEQRFAELMRLN

SEQ ID NO: 4402 - protein, 298 aa, Homo sapiens
MKIHWPPLLFEWVFYLCMILRNHTLVMWRIIRKLSHSQCEKQVFKNSSCHLKAQHCIIGARYSQLFSLQGWAYLVVFRKTPKPGYAGLFAVCSMETGVARIKELGSAWLPDAHMAHTKHCAQTSSSITRNVTAECCWRWWREASRAQSHLDLGPGTSRCPTISPLPLPRMSTQRKRQGARDDCAGLGDPPENTQRTTREELLFCGTNDANASTNAQPEESGQINKVPDTALLGPVSNRPDINRCVETPGKLPGALGGWREAHGPAPGSRALPTPPHDPRRKHLTGPPGVQGVSRPVPV

SEQ ID NO: 4403 - protein, 724 aa, Homo sapiens
MEEGVQAPDWDSDETVIEGSVTESDLEEKELPWRRLLFDQDASLKSEFSLHPDTRGMCKGMPSPEIQLGFKLREDLQEQMNKNKMMPVLSEDTILQSQDETERNQALLQTRKNCSMFIGSFRQSGLSLNHQNIEGPEAESPEVLPHIEKELSEGRDSPEVSLLSGTAITVSDTVAVKETSLVEPEKILAAPNTFFEPRKEVTMTMTSEETKDEESSLETFVSALESLLTSPESTQEERLFELVSDFDRKELMNPLSDSLSSISIPLNSWSACHRDLLEDAKDDALPAELLEALNTLSEAKVETICHRKEGGSSLIARNECLEVEFNTSQTNEDCTQIAETLQDPNPSGLQTLAHQNITSCEPLSNKRNSNSVTNSSDQETACVLRRSSRLEKLKVSRDAKYSDHMYKMPEKILPKILGCEDLTNNNSSAQNFRMQDPALMIDGREKNMHSARFKNGKQIRKNEQFSGKKEKMKVNKISLHSINRRNIFGENLVYKAALHDDADLVHHCIKKGGNVNQPSYAGWTALHEASVGGFYRTASELLKGGADVNIKGLYQITPLHDAVMNGHYKVAELLLLNGADPLFRNDDGKCALDEAKDLCMKRLLERYIPKHQKCLTSAQRSSIDPLDIEDVYQHKKPKFSSKSHIWHVYNENSNRQKLEHVKVNKGSKASLFINKEDVYEYYQKDPKNTKFGKSKHKQSTLDQIYSTGLRKGNLHNVKDPNTNV

SEQ ID NO: 4404 - protein, 262 aa, Homo sapiens
MYVKDWEFPHFMGDVDVNLPGLHTPHMQFKIPFFQKIFKEEYRIHITGKWFNYGIIFLVLILDLNMWKNQIFYKPHEYGQYIGPGQKIYTVKDSESLKDLNRTKLSWEWRSNHTNPRTNKTYVEGDMFLHSRFIGASLDVKCLAFVPSLIAFVWFGFFIWFFGRFLKNEPRMENQDKTYTRMKRKSPSEHSKDMGITRENTQASVEDPLNDPSLVCIRSDFNEIVYKSSHLTSENLSSQLNESTSATEADQDPTTSKSTPTN

SEQ ID NO: 4405 - protein, 168 aa, Homo sapiens
MGTRSSPEEGTPPPLVPECDVEVQPQGHPEESREQEASEVLAEPSSRGGAEQQAEEEEVGEGSSTESSRDAPEATPPIAMAATPPASTSSREGVRGAARRLQGQQLEALTRVALMEQRVKELQRQRKELRIEMEVEVALLRGELAGERVAARREEEQLRELLEQQAAS

SEQ ID NO: 4406 - protein, 131 aa, Homo sapiens
MNLRGWILLTHLGYQGQTKDMESRPRRRYQASSFTDAPVMTMTASLLPLVPDSVSAVTRHQAGSKEPSLSPAPTNSYGAPFPRLGLLSTQFLITYHEKLSPWQLSPSGEIYNCTATTACGMVKLHQDLCCP

SEQ ID NO: 4407 - protein, 405 aa, Homo sapiens
MKHTAFLDEFTNWSRINPNKARIPMAGDTQGVVGTVSKPCFTAYEMKIGAITFQVATGDIATEQVDVIVNSTARTFNRKSGVSRAILEGAGQAVESECAVLAAQPHRDFIITPGGCLKCKIIIHVPGGKDVRKTVTSVLEECEQRKYTSVSLPAIGTGNAGKNPITVADNIIDAIVDFSSQHSTPSLKTVKVVIFQPELLNIFYDSMKKRDLSASLNFQSTFSMTTCNLPEHWTDMNHQLFCMVQLEPGQSEYNTIKDKFTRTCSSYAIEKIERIQNAFLWQSYQVKKRQMDIKNDHKNNERLLFHGTDADSVPYVNQHGFNRSCAGKNAVSYGKGTYFAVDASYSAKDTYSKPDSNGRKHMYVVRVLTGVFTKGRAGLVTPPPKNPHNPTDLFDSVTNNTRSPK

SEQ ID NO: 4408 - protein, 104 aa, Homo sapiens [sequence omitted]

SEQ ID NO: 4409 - protein, 621 aa, Homo sapiens
MLMWPQPHLPTHPHLPTHPHLPTHPHLPTHPHVPTHPHLPTHPMMSKETRQSKLAEAKEQLTDHHPQTNPSVGTAASDTKKKKINNGTNPETTTSGGCHSPEDEQKASHQHQEALRRELEAQVHTIRILTCQKTELQMALYYSQHAVKQLEGEARDLISRLHDSWKFAGELEQALSAVATQKKKADRYIEELTKERDALSLELYRNTITDEELKEKNAKLQEKLQLVESEKSEIQLNVKELKRKLERAKLLLPQQQLQAEADHLGKELQSVSAKLQAQVEENELWNRLNQQQEEKMWRQEEKIQEWEEKIQEQEEKIREQEEKIREQEEKMRRQEEMMWEKEEKMRRQEEMMWEKEEKMRRLEEMMWEKEEKIRELEEKMHEQEKIREQEEKRQEEEKIREQEKRQEQEAKMWRQEEKIREQEEKIREQEKKMWRQEEKIHEQEKIREEEKRQEQEEMWRQEEKIREQEEIWRQKEKMHEQEKIWKQEEKVWRQEEKMHDQEEKIREQEEKMWRQEEKIREQEEKIREQEEKIREQKEKIREQEEKIWEQEEKIREQEEMMQEQEEKMWEQEEKMCEQEEKMQEQEEKMRRQEEKMWEQEVRLRQQEEKMQEHQEHLEAAI

SEQ ID NO: 4410 - protein, 179 aa, Homo sapiens [sequence omitted]

SEQ ID NO: 4411 - protein, 519 aa, Homo sapiens
MFPMQKGSLNLLRQKWESCDYQRSECHPRDSHCTIFQPQESKLLAPEGEVVSAPQSLDPTSLPYSTGEEMWSSKPEEKDSVDKSNNTREYGRPEVLKEDSLSSRRRIERFSIALDELRSVFEAPKSGNKPAEYGGKEVEIERSLCSPAFKSHPGSQLKDSVKDSDKKGKETSFDKMSPESGHSRIFEATAGPNKPESGFAEDSAARGEGVSDLHEVVSLKERMARYQAAVSRGDCRSFSANMMEESEMCAVPGGLAKVKKQFEDEITSSRNTFAQYQYQHQNRSEQGAIHSSQVGTSRSSQEMARNEQEGSKVQKIDVHGTEMVSHLEKHTEEVNQASQFHQYVQETVIDTPEDEEIPKVSTKLLKEQFEKSAQEKILYSDKEMTTPAKQIKKLLLQDKEICILCQKTVYPMECLVADKQNFHKSCFRCHHCNSKLSLGNYASLHGQIYCKPHFKQLFKSKGNYDEGFGHKQHKDRWNCKNQSRSVDFIPNEEPNMCKNIAENTLVPGDRNEHLDAGNS

SEQ ID NO: 4412 - protein, 414 aa, Homo sapiens
MRESQDAAGAHGWNRVGSTATKWFTGAPFGVQSHRFDISAVYPNWKKFSTFTEAPYSTRYSTQVSHIGPGTYSSKETCFSKKKLMKEVDTGWAKAQEATRLTQLPHFQYQAIMKEKRLKEQKLGPCSYNLKDFLEQLREKPCSTRGLLSSGEVRFRGLTGNYYPGPGNYGEKGNPYTKLEENAWNRSHSEGLMCRMSNKPHPRPHQGSGLGPGTYFFKSDLETYVARSVGTRGPYDTFSGDRSKPLPYGHYSMQKKKPRELMNFKSFVEELNSHHNKKHGVFSKLPRNPKTPTERIYWANLSQCPRTLATSGPSFWLPQEKKCKPVNQPPFLLTSKGSGAKACQMIMGSWNPVGVGRYLNTWLMETKDRRQRYRSLFLSGSKRYLSDLARDMLMQIRLFCWKGLEVINFGLSPM

SEQ ID NO: 4413 - protein, 163 aa, Homo sapiens [sequence omitted]

SEQ ID NO: 4414 - protein, 499 aa, Homo sapiens
MASKRKSTTPCMIPVKTVVLQDASMEAQPAETLPEGPQQDLPPEASAASSEAAQNPSSTDGSTLANGHRSTLDGYLYSCKYCDFRSHDMTQFVGHMNSEHTDFNKDPTFVCSGCSFLAKTPEGLSLHNATCHSGEASFVWNVAKPDNHVVVEQSIPESTSTPDLAGEPSAEGADGQAEIIITKTPIMKIMKGKAEAKKIHTLKENVPSQPVGEALPKLSTGEMEVREGDHSFINGAVPVSQASASSAKNPHAANGPLIGTVPVLPAGIAQFLSLQQQPPVHAQHHVHQPLPTAKALPKVMIPLSSIPTYNAAMDSNSFLKNSFHKFPYPTKAELCYLTVVTKYPEEQLKIWFTAQRLKQGISWSPEEIEDARKKMFNTVIQSVPQPTITVLNTPLVASAGNVQHLIQAALPGHVVGQPEGTGGGLLVTQPLMANGLQATSSPLPLTVTSVPKQPGVAPINTVCSNTTSAVKVVNAAQSLLTACPSITSQAFLDASINKK

SEQ ID NO: 4415 - protein, 251 aa, Homo sapiens
MVHWSITLLPGIIPGSLGVMEYYLMDAASLLPVLALGLQPGDIVLDLCAAPGGKTLALLQTGCCRNLAANDLSPSRIARLQKILHSYVPEEIRDGNQVRVTSWDGRKWGELEGDTYDRVLVDVPCTTDRHSLHEEENNIFKRSRKKERQILPVLQVQLLAAGLLATKPGGHVVYSTCSLSHLQNEYVVQGAIELLANQYSIQVQVEDLTHFRRVFMDTFCFFSSCQVGELVIPNLMANFGPMYFCKMRRLT

SEQ ID NO: 4416 - protein, 658 aa, Homo sapiens [sequence omitted]

SEQ ID NO: 4417 - protein, 121 aa, Homo sapiens
MSHQCTHFADEERCLSTGMASLACVGQCLYRSPASTHLFQSIHIFHQQNEFTRNLSSNWYKDYMTWHVMTHTQRRSFFQHAGRGDPIHGLGGGFPHCSVRSPSSSGSRSDYLRFADEEAEP

SEQ ID NO: 4418 - protein, 177 aa, Homo sapiens [sequence omitted]

SEQ ID NO: 4419 - protein, 147 aa, Homo sapiens
MMPRTGLQTEVTGWPKALEIRAAASTVGVIPGSSCQAEWAPARREVPVFWSTWRFASLHRAQSLAGSPTPQPTLHHAHGGRSCAAQPNSVFPFRFSRVVLQNYFLVFFFFERVSLCCPGWSAVAPPQLTATTASWIQAILLPQLQSS

SEQ ID NO: 4420 - protein, 265 aa, Homo sapiens
MQLVQQRSQIQTLQKKVVNLETALSYMTKEFESEVLKLQQHAMIENQAGQVEIDKLQHLLQMKDREMNRVKKLAKNILDERTEVERFFLDALHQVKQQILISRKHYKQIAQAAFNLKMRAACTGRTEYPKIRTFDGREHSTNSVNQDLLEAEKWTHIEGNVDIGDLTWEQKEKVLRLLFAKMNGCPSRKYNQSSRPPVPDYVVSDSGETKEFGDESKLQDKIFITQQIAISDSSGEVVLPTIPKEPQESDTSTQKPSDENFSTSY

SEQ ID NO: 4421 - protein, 127 aa, Homo sapiens
MCSSSSVLYCPQRHVHQSPSLMPFLSVQLTLGIVLIIPQPRIPCLEERGTGQDFPPKGKSRHYMYFFFFFNKTSKWVFLALPSDHPVHFYNHLSGRAQWLMPVIPALWEAEAGESLEVRSSKPAWPT

SEQ ID NO: 4422 - protein, 440 aa, Homo sapiens
MDEPPGKPLSCEEKEKLKEKLAFLKREYSKTLARLQRAQRAEKIKHSIKKTVEEQDCLSQQDLSPQLKHSEPKNKICVYDKLHIKTHLDEETGEKTSITLDVGPESFNPGDGPGGLPIQRTDDTQEHFPHRVSDPSGEQKQKLPSRRKKQQKRTFISQERDCVFGTDSLRLSGKRLKEQEEISSKNPARSPVTEIRTHLLSLKSELPDSPEPVTEINEDSVLIPPTAQPEKGVDTFLRRPNFTRATTVPLQTLSDSGSSQHLEHIPPKGSSELTTHDLKNIRFTSPVSLEAQGKKMTVSTDNLLVNKAISKSGQLPTSSNLEANISCSLNELTYNNLPANENQNLKEQNQTEKSLKSPSDTLDGRNENLQESEILSQPKSLSLEATSPLSAEKHSCTVPEGLLFPAEYYVRTTRSMSNCQRKVAVEAVIQSHLDVKKKGF

SEQ ID NO: 4423 - protein, 307 aa, Homo sapiens [sequence omitted]

SEQ ID NO: 4424 - protein, 119 aa, Homo sapiens
MRRGLGFLPELAVGARGPGGPRPCLSAPEEGEVVSCSGASGWEGGICGQEWVPAKSGKEVVCVSMLEFQPRADGTMGVLRGACRLLERPSQSFRPPSGLGLGLPPPTPFLWRSLRLFQT

SEQ ID NO: 4425 - protein, 295 aa, Homo sapiens
MDFLMSGLAACGACVFTNPLEVVKTRMQLQGELQAPGTYQRHYRNVFHAFITIGKVDGLAALQKGLAPALLYQFLMNGIRLGTYGLAEAGGYLHTAEGTHSPARSAAAGAMAGVMGAYLGSPIYMVKTHLQAQAASEIAVGHQYKHQGMFQALTEIGQKHGLVGLWRGALGGLPRVIVGSSTQLCTFSSTKDLLSQWEIFPPQSWKLALVAAMMSGIAVVLAMAPFDVACTRLYNQPTDAQGKNRVPKFSATSCSASAPLLGTKDVRIVKGQTGHQLFKVTQAPGCSPILLGTQS

SEQ ID NO: 4426 - protein, 735 aa, Homo sapiens
MTPELMIKACSFYTGHLVKTHFCTWRDIARTNENVVLAEKMNRAVTCYNFRLQKSVFHHWHSYMEDQKEKLKNMLLRIQQIIYCHKLTIILTKWRNTARHKSKKKEDELILKHELQLKKWKNRLILKRAAAEESNFPERSSSEVFLVDETLKCDISLLPERAILQIFFYLSLKDVIICGQVNHAWMLMTQLNSLWNAIDFSSVKNVIPDKYIVSTLQRWRLNVLRLNFRGCLLRPKTFRSVSHCRNLQELNVSDCPTFTDESMRHISEGCPGVLCLNLSNTTITNRTMRLLPRHFHNLQNLSLAYCRRFTDKGLQYLNLGNGCHKLIYLDLSGCTQISVQGFRYIANSCTGIMHLTINDMPTLTDNCVKALVEKCSRITSLVFTGAPHISDCTFRALSACKLRKIRFEGNKRVTDASFKFIDKNYPNLSHIYMADCKGITDSSLRSLSPLKQLTVLNLANCVRIGDMGLKQFLDGPASMRIRELNLSNCVRLSDASVMKLSERCPNLNYLSLRNCEHLTAQGIGYIVNIFSLVSIDLSGTDISNEGLNVLSRHKKLKELSVSECYRITDDGIQAFCKSSLILEHLDVSYCSQLSDMIIKALAIYCINLTSLSIAGCPKITDSAMEMLSAKCHYLHILDISGCVLLTDQILEDLQIGCKQLRILKMQYCTNISKKAAQRMSSKVQQQEYNTNDPPRWFGYDREGNPVTELDNITSSKGALELTVKKSTYSSEDQAA

SEQ ID NO: 4427 - protein, 207 aa, Homo sapiens
MVWVHGGALITGAATSYDGSALAAYGDVVVVTVQYRLGVLGFFSTGDEHAPGNQGFLDVVAALRWVQENIAPFGGDLNCVTVFGGSAGGSIISGLVLSPVAAGLFHRAITQSGVITTPGIIDSHPWPLAQKIANTLACSSSSPAEMVQCLQQKEGEELVLSKKLVWPPFWGWCRAMAQRGFYPSPAGAEGQSTPRWGWGQQLMRGRG

SEQ ID NO: 4428 - protein, 241 aa, Homo sapiens
MEKRGESLDLGVRCKRGEERDRRPCWKPSRPGAARGGRGLWTVGGGGSPTETAESQQLGKPPEFWVSAHPGWLQVSCAHRASRWDASRWHPLQRFFARRGVRRPNPSVPSPLPKPPVPSAGSCEPLAPPPTSASGASRSWVTQTLAEAGAYRGCRPAPGSAAGWPRSDRRARLPRKASKPCSPALPSLAACCPQGFLRSGTKRVMCKVLGPGAGVRGTAVECSEQAGVWAHCRPQLTATFS

SEQ ID NO: 4429 - protein, 105 aa, Homo sapiens [sequence omitted]

SEQ ID NO: 4430 - protein, 103 aa, Homo sapiens [sequence omitted]

SEQ ID NO: 4431 - protein, 388 aa, Homo sapiens
MNLGHVKGIWLQIINTGDKNMVGEWALPEEMVDNLPPSNNCILGHILHRLAEKSLPPRAESTTPELPSFAVKGCLLGKTLSGKTTILRSLQKDFPIQILSIDTLVQEAIQAFHDNEKVSEVLPIQKNDEEDALPVLQEEIKESQDPQHVFSAGPVSDEVLPETEGANADKTPKAEEVKSSDSFLKLTTRAQLGAKSEQLLKKGKSIPDVLLVDIIVNAINEIPVNQDCILDGFPMTLNQAQLLEEALTGCNRNLTEVERKKAQKSTLAIDPATSKEIPLPSPAFDFVILLDVSDTSSMSRMNDIIAEELSYKTAHEDISQRVAAENQDKDGDQNLRDQIQHRIIGFLDNWPLLEQWFSEPENILIKINAEIDKESLCEKVKEILTTEI

SEQ ID NO: 4432 - protein, 107 aa, Homo sapiens [sequence omitted]

SEQ ID NO: 4433 - protein, 775 aa, Homo sapiens
MHPGPEEAGSGRYGPRYITDMGAGEDDEGFEDDLDLDISFEEVKPLPATKGGNKKFLVESKKMSISNPKTISRLIPPTSASLPVTTVAPQPIPIQRKGKNGVAIMSRLFDMPCDETLCSADSFCVNDYTWGGSRCQCTLGKGGESCSEDIVIQYPQFFGHSYVTFEPLKNSYQAFQITLEFRAEAEDGLLLYCGENEHGRGDFMSLAIIRRSLQFRFNCGTGVAIIVSETKIKLGGWHTVMLYRDGLNGLLQLNNGTPVTGQSQGQYSKITFRTPLYLGGAPSAYWLVRATGTNRGFQGCVQSLAVNGRRIDMRPWPLGKALSGADVGECSSGICDEASCIHGGTCTAIKADSYICLCPLGFKGRHCEDAFTLTIPQFRESLRSYAATPWPLEPQHYLSFMEFEITFRPDSGDGVLLYSYDTGSKDFLSINLAGGHVEFRFDCGSGTGVLRSEDPLTLGNWHELRVSRTAKNGILQVDKQKIVEGMAEGGFTQIKCNTDIFIGGVPNYDDVKKNSGVLKPFSGSIQKIILNDRTIHVKHDFTSGVNVENAAHPCVRAPCAHGGSCRPRKEGYDCDCPLGFEGLHCQKAIIEAIEIPQFIGRSYLTYDNPDILKRVSGSRSNVFMRFKTTAKDGLLLWRGDSPMRPNSDFISLGLRDGALVFSYNLGSGVASIMVNGSFNDGRWHRVKAVRDGQSGKITVDDYGARTGKSPGMMRQLNINGALYVGGMKEIALHTNRQYMRGLVGCISHFTLSTDYHISLVEDAVDGKNINTCGAK

SEQ ID NO: 4434 - protein, 127 aa, Homo sapiens [sequence omitted]

SEQ ID NO: 4435 - protein, 773 aa, Homo sapiens
MKMRGEKRRDKVNPKSSQRKLNWIPSFPTYDYFNQVTLQLLDGFMITLSTDGVIICVAENISSLLGHLPAEIVGKKLLSLLPDEEKDEVYQKIILKFPLLNSETHIKFCCHLKRGNVEHGDSSAYENVKFIVNVRDICNEFPVVFSGLFSSHLCADFAACVPQEDRLYLVGNVCILRTQLLQQLYTSKAVSDEAVLTQDSDEEPFVGELSSSQGQRGHTSMKAVYVEPAAAAAAAAISDDQIDIAEVEQYGPQENVHMFVDSDSTYCSSTVFLDTMPESPALSLQDFRGEPEVNPLYRADPVDLEFSVDQVDSVDQEGPMDQQDPENPVAPLDQAGLMDPVDPEDSVDLGAAGASAQPLQPSSPVAYDIISQELELMKKLKEQLEERTWLLHDAIQNQQNALELMMDHLQKQPNTLRHVVIPDLQSSEAVPKKQQKQHAGQVKRPLPHPKDVKCFCGLSLSNSLKNTGELQEPCVAFNQQQLVQQEQHLKEQQRQLREQLQQLREQRKVQKQKKMQEKKKLQEQKMQEKKKLQEQRRQKKKKLQERKKWQGQMLQKEPEEEQQKQQLQEQPLKHNVIVGNERVQICLQNPRDVSVPLCNHPVRFLQAQPIVPVQRAAEQQPSGFYQDENCGQQEDESQSFYPEAYQGPPVNQLPLIDTSNSEAISSSSIPQFPITSDSTISTLETPQDYIRLWQELSDSLGPVVQVNTWSCDEQGTLHGQPTYHQVQVSEVGVEGPPDPQAFQGPAAYQPDQMRSAEQTRLMPAEQRDSNKPC

SEQ ID NO: 4436 - protein, 147 aa, Homo sapiens [sequence omitted]

SEQ ID NO: 4437 - protein, 197 aa, Homo sapiens
MLPLLQLVPAKLLNSSCSLEKTLQCSCSFHGIPTPSVQWWMGGVPVGVDGMDGSLQVTSTMLGPWANSTISLTEEPEMGMRLLCEGKNQNGTHALSILLMSRKSSLAAQAFVKGLIQGAIYAGIVIALLFLCLLPLIVKHIRKKQAKKAAAIRAKKSSKVRASQELEMSLKPEEPGKPVVATFSESRILEKQDKRAS

SEQ ID NO: 4438 - protein, 403 aa, Homo sapiens
MDSRECLLFKNECRKVYQDMTHPLNDYFISSSHNTYLVSDQLLGPSDLWGYVSALVKGCRCLEIDCWDGAQNEPVVYHGYTLTSKLLFKTVIQAIHKYAFMTSDYPVVLSLENHCSTAQQEVMADNLQATFGESLLSDMLDDFPDTLPSPEALKFKILVKNKKIGTLKETHERKGSDKRGDNQDKETGVKKLPGVMLFKKKKTRKLKIALALSDLVIYTKAEKFKSFQHSRLYQQFNENNSIGETQARKLSKLRVHEFIFHTRKFITRIYPKATRADSSNFNPQEFWNIGCQMVALNFQTPGLPMDLQNGKFLDNGGSGYILKPHFLRESKSYFNPSNIKEGMPITLTIRLISGIQLPLTHSSSNKGDSLVIIEVFGVPNDQMKQQTRVIKKNGQGNMVIIPA

SEQ ID NO: 4439 - protein, 518 aa, Homo sapiens [sequence omitted]

SEQ ID NO: 4440 - protein, 102 aa, Homo sapiens
MDPVVLSYMDSLLRQSDVSLLDPPSWLNDHIIGFAFEYFANSQFHDCSDHVSFISPEVTQFIKCTSNPAEIAMFLEPLDLPNKRVVFLAINDNSNQAAGGTH

SEQ ID NO: 4441 - protein, 145 aa, Homo sapiens [sequence omitted]

SEQ ID NO: 4442 - protein, 520 aa, Homo sapiens
MFCTRGLLFFAFLAGLDIEFTGLRSNLSGPQQISLFDLPSEWYLKTRQSVQQFTVCQIGLSVFSAIEGEANKYIAHSCNFYLFPTTFGILDSEFSFQASSVQFLNQYGFNYNKFLKNGIPYMNEEQEKKIRHDILTGNWRVRSSPDKDQIKVVIDEVTRWLELAKEGDWMTLPGITGFQAFEVQLVLRQALPNIWTVLKDEGVVVKKVSKQHRWYLQNTSCDRESCWKENILLSARGFSVFFQMLVKAQKPLVGHNMMMDLLHLHEKFFRPLPESYDQFKQNIHSLFPVLIDTKSVTKDIWKEMNFPRVSNLSEVYEVLNSDLNPTKNSGPEIVHASRCEKYVETKCPHEAAYDAFLCGSVLLKVAHLLLQKIYHIDPVPESSFPQYLDVLAPYVNQVNLIRAGVPKINFSGPDYPSIRPPILILSVKRWPGVSEQQVYHKFQNLCKFDVRRLTRSQFLLLTNKFKDARNILKEYRDHPTLCISLYRYWRHSPNVNCLLQVCGIVTAWALLAFILGRSGT

SEQ ID NO: 4443 - protein, 114 aa, Homo sapiens [sequence omitted]

SEQ ID NO: 4444 - protein, 407 aa, Homo sapiens [sequence omitted]

SEQ ID NO: 4445 - protein, 720 aa, Homo sapiens
MDALGKLLKTMMWDNVNAEDCQEMFNLLQMWPVSQKEWERERAFQITAKVLTNDIEAPENFKIGSLLGLLAPHSCDTLPTIRQAAASSTIGLFYIKGIHLEVERLQGLQEGLESDDVQVQIKISSKIAKIVSKFIPNEEILMFLEEMLDGLESLNPTCTKACGIWMITVLKQQGAALEDQLLEILGTIYHHMPVLRQKEESFQFILEAISQIASFHMDTVVVNLLQKPLPFDRDTKTLWKALAEKPASSGKLLQALIDKLETELEDDIARVEAISVACAMYEVISMGTSVTGLYPELFTLLLKLVSCTLGQKMPTCPWSHRRHVMQQGEQQQIPDPCRLSTATLKCLQAQAMREGLAKESDEGDNLWTLLSSPSTHHIGVCSLARSMAVWQHGVILDIMEQLLSSLTSSSENYRITGAAFFSELMKEPILWKHGNLRNVLILMDQSAWDSNATLRQMAIRGLGNTASGAPHKVKKHKQLMLESIIRGLYHLARTEVVCESLKALKKILELLTDRDVSFYFKEIVLQTRTFFEDEQDDVRLTAIFLFEDLAPLTGRRWKIFFAEEIKKSLISFLLHLWDPNPKIGVACRDVLMVCIPFLGLQELYGVLDRLLDQDLPRARDFYRQFCVKLAKKNQEILWILHTHSFTFFTSTWEVIRSAAVKLTDAVVLNLTSQYVELLDREQLTTRLQALRQDPCISVQRAAEAALQTLLRRCKETSIPL

SEQ ID NO: 4446 - protein, 210 aa, Homo sapiens
MEMDEDPDNLPAQGQGNIIITKYEQGHRAGAAVDLGHEQVDVRKYTNNLGIVHEMELPRVSALEVKQRRKESKRTNKWQKMLADWTKYRSTKKLSQRVCKVIPLAVRGRALSLLLDIDKIKSQNPGKYKVMKEKGKRSSRIIHCIQLDVSHTLQKHMMFIQRFGVKQQELCDILVAYSAYNPVSIPGQRYSWYLCPYSQAWVSLGGVATS

SEQ ID NO: 4447 - protein, 389 aa, Homo sapiens
MMNSDQKAVKFLANFYINGGKHWTHGHLRQTQPEPTQPKASVLLLGPEPGMAWDETQPPKMKEIPVGLRLQTGTPQESLPTYTQTLRELLLEQRPLITADLEVPSPTRYQVPSPSVRESSPHPHYSIGCKHQGREGGGRRAWQTLWFQSESPFTQKADFDQEQKWPSPAHYQLLSRPAFPAFSFRGCHSASKTPEGHTHLGLPGARGLGLRVQPQSLLQASLQAPGKRCPGPNTYNILPGSRLQSPRSPAFSMSRSPAFTSWLSTWLPAFSFGSPNPWPSRLPRGGLQLTLPFGAWRGHPGCTQTQAPRHRPLLHALEPAGHNLLGPATEWNHGLPRGFPRPPLGLGAPAWPSDPLGTPMHPSGWPTLLWAVDKAGPAWIPHLPISPLH

SEQ ID NO: 4448 - protein, 463 aa, Homo sapiens
MRRTEATLWMPTAEAVHPTPTVGATAVPATVTARATAMEEKAAMSTEAARMTPTVGAALPTPTVGATTVPARATATEEEAATRSTEAAPSMPTVEAARPMPTAGATTVPAGATATEEEAATRSTEAAPLMTTVEAARLMPTVGATTVLARATATEEEAATRSTEAACSMPTVEAARLMPTVGATTVPARATAMEEAAATRSTEATRLMPTAEAARLTPTAGATTVPARATTMEEEVAHSMPTAVAACLTPTVGAMTVPAGATATEEEAATRSTEAARSMPTAEATHPMPTAGATTVPAGTTPAEEEAATRRTEVTLSMPTAEATHPTPTVGAVTVPATVTTGATAMEEEATTKSTEAARTTPTAGADRPMPTAGTTTPKPTAGAATVSATAMAGVTITEEEAATRNTKAARPMPTAGAAASTVPTTVMAGATATEEEAATRSTEAPRLTPTVGAATVPSRVTA

SEQ ID NO: 4449 - protein, 107 aa, Homo sapiens
MLSQRCLRPGPVEPPYPLSTPSPLSSDQLAWSLVRPDAGPFTMVGTLCPPGTGAPRVSAVRTLTTIHPTRPFLSFFYFFEMESRSVDQAGVQWCDLGSLQSLPPGER

SEQ ID NO: 4450 - protein, 754 aa, Homo sapiens [sequence omitted]

SEQ ID NO: 4451 - protein, 120 aa, Homo sapiens
MARPAALVVTWRLCCTFLLGRTPQFLDPTSSPSGFTTLFGGTYTHSFLFVLFFVYLFIYLILFFETESPSVAQSGVQWCDLVSLQPPPPRFKQFSCFSLPSSWDYIQQDLTLVRLQNKEN

SEQ ID NO: 4452 - protein, 516 aa, Homo sapiens
MEFGLSWVFLVALLRGVQCQVRVVESGGGVVQPGGSLRLSCKVSQVRFFDHGMHWVRQAPGKGLEWVAVIWNDGTQEYYAKSVKGRFTASRDNYKSMVYLQMDYLRADDTALYYCARESGYGGTSFDHWGQGIPVTVAAASTKGPSVFPLAPCSRSTSGGTAALGCLVKDYFPEPVTVSWNSGALTSGVHTFPAVLQSSGLYSLSSVVTVPSSSLGTQTYTCNVNHKPSNTKVDKRVELKTPLGDTTHTCPRCPEPKSCDTPPPCPRCPEPKSCDTPPPCPRCPEPKSCDTPPPCPRCPAPELLGGPSVFLFPPKPKDTLMISRTPEVTCVVVDVSHEDPEVQFKWYVDGVEVHNAKTKPREEQFNSTFRVVSVLTVLHQDWLNGKEYKCKVSNKALPAPIEKTISKTKGQPREPQVYTLPPSREEMTKNQVSLTCLVKGFYPSDIAVEWESSGQPENNYNTTPPMLDSDGSFFLYSKLTVDKSRWQQGNIFSCSVMHEALHNRFTQKSLSLSPGK

SEQ ID NO: 4453 - protein, 129 aa, Homo sapiens; identical to SEQ ID NO: 4390

SEQ ID NO: 4454 - protein, 420 aa, Homo sapiens
MDGADESEKLDCQFSTHHPRPLAFCSFGSRLMGRGYYVFDRRWDRFRFALNSMVEKHLNSQMWKKIPPAADSPLPSPAAHITTPVPASVLQPFSNPSAVYLPSAPISSRLTSSYIMTSAMLSNAAFVTSPDPSALMSHTTAFPHVAATLSIMDSTFKAPSAVSPIPAVIPSPSHKPSKTKTSKSSKVKDLSTRSDESPSNKKRKPQSSTSSSSSSSSSSLQTSLSSPLSGPHKKNCVLNASSALNSYQAAPPYNSLSVHNSNNGVSPLSAKLEPSGRTSLPGGPADIVRQVGAVGGSSDSCPLSVPSLALHAGDLSLASHNAVSSLPLSFDKSEGKKRKNSSSSSKACKITKMPGMNSVHKKNPPSLLAPVPDPVNSTSSRQVGKNSSLALSQSSPSSISSPGHSRQKNTNRTGRIRTLP

SEQ ID NO: 4455 - protein, 431 aa, Homo sapiens
MEVTAVGEEANQGDLLGFGQRCCSLGSSNPWLYRTAGIFPEHCTEEKKIGTYFRVAPQASKSQRSRCHGMAASEARPGEATAASYGRPFPTHPRRQEFRARVVRGPTMLVTAYLAFVGLLASCLGLELSRCRAKPPGRACSNPSFLRFQLDFYQVYFLALAADWLQAPYLYKLYQHYYFLEGQIAILYVCGLASTVLFGLVASSLVDWLGRKNSCVLFSLTYSLCCLTKLSQDYFVLLVGRALGGLSTALLFSAFEAWYIHEHVERHDFPAEWIPATFARAAFWNHVLAVVAGVAAEAVASWIGLGPVAPFVAAIPLLALAGALALRNWGENYDRQRAFSRTCAGGLRCLLSDRRVLLLGTIQALFESVIFIFVFLWTPVLDPHGAPLGIIFSSFMAASLLGSSLYRIATSMTVIEKQALGICSAFALLSW

SEQ ID NO: 4456 - protein, 277 aa, Homo sapiens
MLPLNCVCFLQDDPFQMKIGGMVDMKKLKERGKDKISEEEDLHLGTSFSAETNRRDEDADMMKYIETELKKRKGIVEHEEQKVKPKNAEDCLYELPENIRVSSAKKTEEMLSNQMLSGIPEVDLGIDAKIKNIISTEDAKARLLAEQQNKKKDSETSFVPTNMAVNYVQHNRFYHEELNAPIRRNKEEPKARPLRVGDTEKPEPERECNKGLGAAWSAQQCGNPWRQDAAGDRVEPGIGAGAYGFQSMLWTMTMCLPLSKPQFPHWNPNRTYLLGLL

SEQ ID NO: 4457 - protein, 600 aa, Homo sapiens
MTCTAFGNPKPIVTWLKEGTLLGASGKYQVSDGSLTVTSVSREDRGAYTCRAYSIQGEAVHTTHLLVQGPPFIVSPPENITVNISQDALLTCRAEAYPGNLTYTWYWQDENVYFQNDLKLRVRILIDGTLIIFRVKPEDSGKYTCVPSNSLGRSPSASAYLTVQYPARVLNMPPVIYVPVGIHGYIRCPVDAEPPATVVKWNKDGRPLQVEKNLGWTLMEDGSIRIEEATEEALGTYTCVPYNTLGTMGQSAPARLVLKDPPYFTVLPGWEYRQEAGRELLIPCAAAGDPFPVITWRKVGKPSRSKHSALPSGSLQFRALSKEDHGEWECVATNVVTSITASTHLTVIGTSPHAPGSVRVQVSMTTANVSWEPGYDGGYEQTFSVWMKRAQFGPHDWLSLPVPPGPSWLLVDTLEPETAYQFSVLAQNKLGTSVFSEVVTVNTLAFPITTPEPLVLVTPPRCLIANRTQQGVLLSWLPPANHSFPIDRYIMEFRVAERWELLDDGIPGTEGEFFAKDLSQDTWYEFRALAVMQDLISEPSNIAGVSSTDIFPQPDLTEDGLARPVLAGIVATICFLAAAILFSTLAACFVNKQRKRKLKR

SEQ ID NO: 4458 - protein, 481 aa, Homo sapiens
MDDVKATGRELFQQVCNVASIRDAQFFGLCVVRNNEYIFMDLEQKLSKYFSKDWKKERNEGNEKPRAPFVAFLRVQHYVENGRVISDHRARHLYYCHLKERVLRSQCAHREEAYFLLAACALQADLGEHRESAHAGRYFEPHSYFPQWIITKRGIDYILRHMPTLHRERQGLSPKEAMLCFIQEACRLEDVPVHFFRLHKDKKEGRPTVILGLALRGVHIYQGKKLEIQLDGLPAAQKLVYYTGCTWRSRHLLHLLRASHQLHLRVRPTLQQLRQREEAEEKQHYRESYISDELELDLASRSFPGSGVSSQHCPHCLSRHSADSHGSSYTSGIKANSWLRESREMSVDVPLEVHGLHEKEPSSSPRTSRSHPSTRGDSQATRQEPCTQVRTRGQSAEAVHQIQEMTAGVSEEQHSHGLDDMQLHQLALHPAPTSLSHTFHRALDCRLAGPCETRATLPSKRSSNCLALDLFGEAPPQEFVV

SEQ ID NO: 4459 - protein, 391 aa, Homo sapiens
MGKAAAPSRGGGCGGRSRGLSSLFTVVPCLSCHTAAPGMSASTSGSGPEPKPQPQPVPEPERGPLSEQVSEAVSEAVPRSEPVSETTSEPEPGAGQPSELLQGSRPGSESSSGVGAGPSTKAASEPLSRAVGSATFLRPESGSLPALKPLPLLRPGQAKTPLGVPMSGTGTTSSAPLALLPLDSFEGWLLKWTNYLKGYQRRWFVLGNGLLSYYRNQGEMAHTCRGTINLSTAHIDTEDSCGILLTSGARSYHLKASSEVDRQQWITALELAKAKAVRVMNTHSDDSGDDDEATTPADKSELHHTLKNLSLKLDDLSTCNDLIAKHGAALQRSLTELDGLKIPSESGEKLKVVNERATLFRITSNAMINKPLPEASQALPPYPRPKLLCLE

SEQ ID NO: 4460 - protein, 197 aa, Homo sapiens
MGFSEQGRQRLHPEEALYLLECGSIHLFHQDLPLSIQEAYQLLLTDHTVTFLQYQVFSHLKRLGYVVRRFQPSSVLSPYERQLNLDASVQHLEDGDGKRKRSSSSPRSINKKAKALDNSLQPKSLAASSPASGTSRCPRMWGTDLTALQRMELAPGDRDCLFSGTISAASCTQTLTCSFRGQSGPWPWVSDTHRVKL

SEQ ID NO: 4461 - protein, 333 aa, Homo sapiens
MHPQQTHWGVTSSQQCTLNRLTGGSRAPSNAPSTDSSGGHELPAMHPQQTHGGSRAPSNEPSTDPRGLTSSQLCTLNRPTGAHELPAMHPQQTHWGLTSSRSEASFGSRDSGGRRVSPWPHGWSNQLLEVMTLLCCGLHQTTHVGWRGSGLCGCPSWQSVVCPALNWVPRRHCSPDGLVRLLGVQLLMTSTVRGCRQHRHWYLQSRVHSWGRLDQGAARVWGTRELSGTPKARCGPVHSCSVDGEGRVPGHCAQESELQRRLRRFGSAQDSLALCRSMGKPSTLPFQGGLGAWLPLSGPGRLLIISAMDAALAWGGGEEPPALAPPPQPSLAA

SEQ ID NO: 4462 - protein, 114 aa, Homo sapiens [sequence omitted]

SEQ ID NO: 4463 - protein, 110 aa, Homo sapiens
MEPSKTFMRNLPITPGYSGFVPFLSCQGMSKEDDMNHCVKTFQEKTQRYKEQLRELCCAVATAPKLKPVNSEETVLQALHQYNLQYHPLILGSSALKPFPLTPGHPCRFS

SEQ ID NO: 4464 - protein, 567 aa, Homo sapiens
MRTAGRDPVSAGLQFPKDGSTQRPANRARFVPARTRPSPLHPCCFCFEGGGSMLSPQRVAAAASRGADDAMESSILLQDHIRDLDVVVVSVAGAFRKGKSFILDFMLRYLYSQKESGHSNWLGDPEEPLTGFSWRGGSDPETTGIQIWSEVFTVEKPGGKKVAVVLMDTQGAFDSQSTVKDCATIFALSTMTSSVQIYSLSQNIQEDDLQQLQLFTEYGRLAMDEIFQKPFQTLMFLVRDWSFPYEYSYGLQGGMAFLDKRLQVKEHQHEEIQNVRNHIHSCFSDVTCFLLPHPGLQVATSPDFDGKLKDIAGEFKEQLQALIPYVLNPSKLMEKEINGSKVTCRGLLEYFKAYIKIYQGEDLPHPKSMLQATAEANNLAAAASAKDIYYNNMEEVCGGEKPYLSPDILEEKHCEFKQLALDHFKKTKKMGGKDFSFRYQQELEEEIKELYENFCKHNGSKNVFSTFRTPAVLFTGIVALYIASGLTGFIGLEVVAQLFNCMVGLLLIALLTWGYIRYSGQYRELGGAIDFGAAYVLEQASSHIGNSTQATVRDAVVGRPSMDKKAQ

SEQ ID NO: 4465 - protein, 371 aa, Homo sapiens
MYRSGERLLGSHALPAEQRDFLPLETTNNNNNHHQPGAWARRAGSSASSPPSASSSPHPSAAVPAADPADSASGSSNKRKRDNKASGGRAAGGGRADGGGVVYSGTPWKRRNYNQGVVGLHEEISDFYEYMSPRPEEEKMRMEVVNRIESVIKELWPSADVQIFGSFKTGLYLPTSDIDLVVFGKWENLPLWTLEEALRKHKVADKGSVKVLDKATVPIIKLTDSFTEVKVDISFNVQNGVRAADLIKDFTKKYPVLPYLVLVLKQFLLQRDLNEVFTGGIGSYSLFLMAVSFLQLHPREDACIPNTNYGVLLIEFFELYGRHFNYLKTGIRIKDGGSYVAKDEVQKNMLDGYRPSMLYIEDPLQPGIEIR

SEQ ID NO: 4466 - protein, 134 aa, Homo sapiens [sequence omitted]

SEQ ID NO: 4467 - protein, 100 aa, Homo sapiens
MSQSSTGKKTEFITFDLTTKKTGGQTVIQAYEIASFQVAAHLKCPIWMGASDGYMIVFTSGPYLLLFSITGFLLQRFEDHQAAINNFWVVCMILLHCFLI

SEQ ID NO: 4468 - protein, 624 aa, Homo sapiens
MQSRENIWVPADPVSPPSLPSVPLLESLVMGPQGVLSESKALWETMGQKENLWASDSPDPVHSTPPTTLMEPHRINPGECLATSEATWKDTEHSRNSSASRSPSLALSPPPALAPELLRVRSMGVLSDSEARCGDIQKTKNSWASKHPACNLPQDLHGASPLGVLSDSQSIVGEMEQKENCVPVFPGRGSSPSSNSVSKSHVSEPIADQSNYEPDGEAVEQRKNHWATELPAPSSLSTPLPEPHIDLELVWRNVQQREVPQGPSPLAVDPLHPVPQPPTLAEAVKIERTHPGLPKGVTCPGVKAEAPLSQRWTVPELLTHPGIHAWQWSRELKLRLEKLRQSPASRAPGPSQSFCSSPILSSTIPDFWGLPSCPPQQIYPPNPCPHSSSCHPQEVQRTVPQPVQSSHCHHFQSSSQLQPQESGRAEQGSQRGEKMKGKMVSQVPSQGPCVHMEAGVDYLSPGPGEPSNSKVLVSGKRKDKASASSSAKKREHPRKPKAGDHRRGTARLGLSTVTGKNHPAQARSLVEAPVSTFPQRSQHRGQSSQHTALPQLLLPKASGPQDQPEAGRRASDILTPRHCKHCPWAHMEKYLSFPTLKASLTRGLQKVLAKCLDNHRPLPTKSSQ

SEQ ID NO: 4469 - protein, 214 aa, Homo sapiens
MRGRARGVGRAGWTSGPAAGAVVRPLCRGGPLGFRVSSGKRLAGLVGCAAILETGPMVQGRGIMTTGSGQEPGQSGTSLRTGPMGSLGQAEQVSSMPMGSLEHEGLVSLRPVGLQEQEGPMSLGPVGSAGPVETSKGLLGQEGLVEIAMDSPEQEGLVGPMEITMGSLEKAGPVSPGCVKLAGQEGLVEMAPHTACRAACSPGAVPWCECCPAW

SEQ ID NO: 4470 - protein, 316 aa, Homo sapiens [sequence omitted]

SEQ ID NO: 4471 - protein, 161 aa, Homo sapiens
MTPLLFNGCRSGEIFGIDLRCGNQGSGWKAICLSHDSAVTSLQILQDGQFLVSSDMTGTIKLWDLRATKCVTQYEGHVNNSAYLPVHVNEEEGVVAAVGQDCYTRIWSLRHGHLLTTIPSPYPASENDIPSVAFSSRLGGFRGAPGLLMAVREDLYCFSYG

SEQ ID NO: 4472 - protein, 110 aa, Homo sapiens [sequence omitted]

SEQ ID NO: 4473 - protein, 468 aa, Homo sapiens
MEIKKQITGMRRLLNDSTGRIYQRVGKEGEKLKEEPQDLDLVWPPRLNSSAEAPQSLHPSSRGVWNELPPQSGQFSGQYGTRSRTFQSQPHPTTSSNGELPVVNSSAGSNCCTCNCQSTLQAILQELKTMRKLMQIQAVGTQNRQQPPISLICSQRTAVSRKRNKKKKVPPKTVEPLTVKQKPSGSEMEKKSVVASELSALQAAEHTSPEESRVLGFGIVLESPSSDPEVQLAEGFDVFMPKSQLDSILSNYTRSGSLLFRKLVCAFFDDKTLANSLPNGKRKRGLNDNRKGLDQNIVGAIKVFTEKYCTANHVDKLPGPRDWVQILQDQIKLARRRLKRGSAEIADSDERLDGIALPPTGACGGPCTVLPGGSAAVTLVLQSSPQTMSQEKGQMAEPWEEQHLVLLNNLTRDRAETGALSQTSQDFKHHSFLITQVSATLHHQRGIRNFPAPGSAKSLTLHISCLSL

SEQ ID NO: 4474 - protein, 216 aa, Homo sapiens
MSVSGHRTQTAGGEDPGALRGQRRCASRVLGAPGPTFDKRWRRTCAGGPCAGGIPVLEVSVLAGSLYCGGVPVPVLGGSVLRALCRGHPCAGGIPVLGGPVLGASLCWRSLCWGDPCTGGGVPVPVLGGSVLRALCWGHPCAGGIPVLGGPVLGGSLCWRSLCLGGSLYWGGVPVLDPCAAGPVLGGSLCWGPCAGGPCAGGIPGLGGSLCWGALC

SEQ ID NO: 4475 - protein, 595 aa, Homo sapiens
MSPEKQHREEDEVDSVLLSASKILNSSEGVKESGCSDTEYGCIAESENQIQPQSALKVLQQQLESFQALRMQTLQNVSMVQSEISEILNKSIIEVENPQFSSEKNLVFGTRIEKDLPTENQEENLSMEKSHHFEDSKTLHSVEEKLSGDSVNSLPQSVNVPSQIHSEDTLTLRTSTDNLSSNIIIHPSENSDILKNYNNFYRFLPTAPPNVMSQADTVILDKSKITVPFLKHGFCENLDDICHSIKQMKEELQKSHDGEVALTNELQTLQTDPDVHRNGKYDMSPIHQDKMNFIKEENLDGNLNEDIKSKRISELEALVKKLLPFRETVSKFHVHFCRKCKKLSKSEMHRGKKNEKNNKEIPITGKNITDLKFHSRVPRYTLSFLDQTKHEMKDKERQPFLVKQGSIISENEKTSKVNSVTEQCVAKIQYLQNYLKESVQIQKKVMELESENLNLKSKMKPLIFTTQSLIQKVETYEKQLKNLVEEKSTIQSKLSKTEEYSKECLKEFKKIISKYNVLQGQNKTLEEKNIQLSLEKQQMMEALDQLKSKEHKTQSDMAIVNNENNRMSIEMEAMKTNILLIQDEKEMLEKKTHQL

SEQ ID NO: 4476 - protein, 150 aa, Homo sapiens
MSSRRSSLSPWKCPWFVYCFERPISREAGPVVHQSPTVLYLHSELAARQTQGRLLPREPAAEDLRLSLPGGHAALGLFKLQGEDSYPHPPTVLLGEDLSSSGWNSWVFGILNISRDEEAIGILTTILQLRETESSAVKWTHTKHSRELGP

SEQ ID NO: 4477 - protein, 348 aa, Homo sapiens
MTPMKRSVQTQVSEPFMESWGEESLPELPAEQSLTEYSDLEEAPSAHTLYVGHLNPQFSVPVLACLLRDTLERLEMPVAREHIEVVRRPRKAYALVQVTVHRDTLASLPWRLQTALEEHLILKELAARGKDLLLSEAQGPFSHREQIVGKDQLFQGAFLGSETRNMEFKRGSGEYLSLAFKHHVRRYVCAFLNSEGGSLLVGVEDSGLVQGIRCSHRDEDRARLLVDSILQGFKPQIFPDAYTLTFIPVISTSETSVPLKVIRLTVHTPKAQSQPQLYQTDQGEVFLRRDGSIQGPLSASAIQEWCRQRWLVELGKLEEKMKALMMEKEQLQQQLQQHGPVSCTCCVL

SEQ ID NO: 4478 - protein, 143 aa, Homo sapiens
MLGIIPSLLRRALLQVHGSLCSIGRRPGDTGEARERGQVAPPDSLACCEEGRNGSLVPKVRPDRCVGEHGQHPGGAGRALEQASQFRPWPSPWCLLAWPGFLIQQVWPGWDFAFLECSPFLLMLLVQGPHFENHWFASSSPSP

SEQ ID NO: 4479 - protein, 119 aa, Homo sapiens
MKSVANSKLKQIEKEYTQKLAKSSQIVAELQTTISSLKEENSQQQLAAERRLQDVRQKFEDEKKQLIRDNDQAIKVLQDELENRSNQVRCAEKKLQHKELESQEQVPSPLLFDSLVYFL

SEQ ID NO: 4480 - protein, 221 aa, Homo sapiens
MEEPRPSKRLRSMAPNQASGGPPPEPGCCVADPEGSVEADGPAQPAQPAKPIAYVKPFRRQPPARPESPPPAERGRRRGGSRRPGRGRGRRAGPRGDAGQRQGAEGLMAPDVHIQLDHHGEPGHQGEPEITETAAFSLSETGPPPGTVQEGPGPDVAQPELGFQEPPAAPGPQAVDWQPVLTLYPCIGFRALGDSAVLQVIQTPQGTYVQGVPVFLTDIAY

SEQ ID NO: 4481 - protein, 304 aa, Homo sapiens
MSVAGLKKQFYKASQLVSEKVGGAEGTKLDDDFKEMEKKVDVTSKAVTEVLARTIEYLQPNPASRAKLTMLNTVSKIRGQNLCEKDLKEIQHHLKKLEGRRLDFDYKKKRQGKIPDEELRQALEKFEESKEVAETSMHNLLETDIEQVSQLSALVDAQLDYHRQAVQILDELAEKLKRRMREASSRPKREYKPKPREPFDLGEPEQSNGGFPCTTAPKIAASSSFRSSDKPIRTPSRSMPPLDQPSCKALYDFEPENDGELGFHEGDVITLTNQIDENWYEGMLDGQSGFFPLSYVEVLVPLPQ

SEQ ID NO: 4482 - protein, 166 aa, Homo sapiens
MQKPSCGIVPLASPGTSAELQNNFIEYISFIHQYDARKTPNEPLQGKRHGAFVQREIKPGSRPTVPKGAEVLLNTPGSRSSEQSKKTEKGNSAESRMISPGLCQQNSQELLEPKTHLSETDVRQAAKACPSTLESREKTSGATQTTVGDALFTTHKPLNPPIKKSE

SEQ ID NO: 4483 - protein, 642 aa, Homo sapiens
MLTRPSQVLLNSLSVDPDAECKYGLYFRDGRRKVDYILVYHHKRPSGNRTLVRRVQHSDTPSGARSVKQDHPLPGKGASLDAGSGEPPMDYHEDDKRFRREEYEGNLLEAGLELERDEDTKIHGVGFVKIHAPWNVLCREAEFLKLKMPTKKMYHINETRGLLKKINSVLQKITDPIQPKVAEHRPQTMKRLSYPFSREKQHLFDLSDKDSFFDSKTRSTIVYEILKRTTCTKAKYSMGITSLLANGVYAAAYPLHDGDYNGENVEFNDRKLLYEEWARYGVFYKYQPIDLVRKYFGEKIGLYFAWLGVYTQMLIPASIVGIIVFLYGCATMDENIPSMEMCDQRHNITMCPLCDKTCSYWKMSSACATARASHLFDNPATVFFSVFMALWAATFMEHWKRKQMRLNYRWDLTGFEEEEDHPRAEYEARVLEKSLKKESRNKETDKVKLTWRDRFPAYLTNLVSIIFMIAVTFAIVLGVIIYRISMAAALAMNSSPSVRSNIRVTVTATAVIINLVVIILLDEVYGCIARWLTKIEVPKTEKSFEERLIFKAFLLKFVNSYTPIFYVAFFKGRFVGRPGDYVYIFRSFRMEEVTEILFISGSPFCLAYDLSTPCTWEKQLQHICSAKSSRFLSFLLETFLFP

SEQ ID NO: 4484 - protein, 136 aa, Homo sapiens [sequence omitted]

SEQ ID NO: 4485 - protein, 370 aa, Homo sapiens
MTTTYMLSKNPLEVFDICRFNTCNFGKALESSRCARQPREERQPEDLGPPAVPWDSCPSGEEGGPRTMAAVHDLEMESMNLNMGREMKEELEEEEKMREDGGGKDRAKSKKVHRIVSKWMLPEKSRGTYLERANCFPPPVFIISISLAELAVFIYYAVWKPQKQWITLDTGILESPFIYSPEKREEAWRFISYMLVHAGVQHILGNLCMQLVLGIPLEMVHKGLRVGLVYLAGVIAGSLASSIFDPLRYLVGASGGVYALMGGYFMNVLVNFQEMIPAFGIFRLLIIILIIVLDMGFALYRRFFVPEDGSPVSFAAHIAGGFAGMSIGYTVFSCFDKALLKDPRFWIAIAAYLACVLFAVFFNIFLSPAN

SEQ ID NO: 4486 - protein, 112 aa, Homo sapiens
MVLELGRRNTALLKRGELVLGPSPLPTSCPTKPGILLSRSFAAGSSESPPEGEGPVELGRRDGTGDFTSCSFEKGLGASLGRGSNRAGLRRGLFASKIRAGGAPEASPAWRK

SEQ ID NO: 4487 - protein, 278 aa, Homo sapiens
MDALSSCVTPTASSYAHCNYFQNPSMQSSYPVEFLPSNWPCSTTDENTKTEVNLEAVFQIVDELHSSPKLEMVKVEPVENQCPTSPSYRGQHILANSNNSNPCSASQASQLEPLTPVGSDIMSFVVGTEQAVACSLPQSPEYIYTIHTAQPVENSTIQESAAIQQAHVKLKEHLNHNPSPSSVVFVQEGPPFSTHQVDANIKCQTSSRENILPSEQMGFLISEMGPASKPSEDTGLATPARYREHRSNSQQGKSPDLHLLVDVACKQERFPKEEELKE

SEQ ID NO: 4488 - protein, 130 aa, Homo sapiens
MNLNYTLEQMDLTDIYRTFHPTTPEYTFYSTAHATFSKIDHMTGHKTSLNKFKQIEIISNTLSDHSGKKLEINSKRNLQNHANTWKLNNLLLNEHWDKNEIKIEILKIFKLNDNNDTTYQNLWDTGKVVL

SEQ ID NO: 4489 - protein, 807 aa, Homo sapiens [sequence omitted]

SEQ ID NO: 4490 - protein, 427 aa, Homo sapiens
MSWGLRLYVPGFDVGTMFTIQKKILVPWSPPKPIGPLTDLGDPMFQNHPDKVNLTVPPPFSVPKTQLQRHQLQPSLMSILGGVHHFLNLSQPTLAQDCWLCLKAKPPYYIGLGVEVALKGSPLSCHAQPHAFTLGDVSGSASCLISTGYDLSISPFQAICNQSLLTPMSISVSYQAPNNTWLACTSGFTRCLNGAKSEPLLCVLVHVLPQVYEYSGSEGQLLIAPPELHPRLRRAAPLLVSLLAGLSIAGSAAISTAALVRGETGLMSLSQQVDANLNNLQSAIDILHSQVESLAEVVLQNCRGLDLLFLSQGGLCAALGESCCFYANQSGVIKDTLQKVQKNLDRSQQERENNTAWYQSMFNWNPWLTTLITGLAGPIIIILLSLIFGPCILNWFLDFVKQRIASVKLMYLRTQYNPLVVTEESTT

SEQ ID NO: 4491 - protein, 244 aa, Homo sapiens
MGDLFSLFWEVDPPPIPVNCAIPNQDYECWKDDSCGTIGSFLLWYFVIVFVLMFFSRASVWMSEDKKDEGSGTSTSVRKASKETSCKRQSKDSAWDPSQTMKKPKQNQLTPVTNSEVALVNAYPEQRRARRQSQFNEVNQNQHDSDTTEYGSEESNSEASSWKESESEHHPSPDSIKRRKMAQRQRNLGSYQMSERHCLHCKALRTNEWLAHHSRQKPSVTPPMKRDSQEESSISDINKKFSKF

SEQ ID NO: 4492 - protein, 950 aa, Homo sapiens
MFATESYIIDSAQAVQIKKMEPDEQLRNDHMNLRGHTPLDTQLEDKEKKISAAQTRLSELHDEIEKAEQQILRATEEFKQLEEAIQLKKISEAGKDLLYKQLSGRLQLVNKLRQEALDLELQMEKQKQEIAGKQKEIKDLQIAIDSLDSKDPKHSHMKAQKSGKEQQLDIMNKQYQQLESRLDEILSRIAKETEEIKDLEEQLTEGQIAANEALKKDLEGVISGLQEYLGTIKGQATQAQNECRKLRDEKETLLQRLTEVEQERDQLEIVAMDAENMRKELAELESALQEQHEVNASLQQTQGDLSAYEAELEARLNLRDAEANQLKEELEKVTRLTQLEQSALQAELEKERQALKNALGKAQFSEEKEQENSELHAKLKHLQDDNNLLKQQLKDFQNHLNHVVDGLVRPEEVAARVDELRRKLKLGTGEMNIHSPSDVLGKSLADLQKQFSEILARSKWERDEAQVRERKLQEEMALQQEKLATGQEEFRQACERALEARMNFDKRQHEARIQQMENEIHYLQENLKSMEEIQGLTDLQLQEADEEKERILAQLRELEKKKKLEDAKSQEQVFGLDKELKKLKKAVATSDKLATAELTIAKDQLKSLHGTVMKINQERAEELQEAERFSRKAAQAARDLTRAEAEIELLQNLLRQKGEQFRLEMEKTGVGTGANSQVLEIEKLNETMERQRTEIARLQNVLDLTGSDNKGGFENVLEEIAELRREVSYQNDYISSMADPFKRRGYWYFMPPPPSSKVSSHSSQATKDSGVGLKYSASTPVRKPRPGQQDGKEGSQPPPASGYWVYSPIRSGLHKLFPSRDADSGGDSQEESELDDQEEPPFVPPPGYMMYTVLPDGSPVPQGMALYAPPPPLPNNSRPLTPGTVVYGPPPAGAPMVYGPPPPNFSIPFIPMGVLHCNVPEHHNLVSGKTYNSLSTLLPWVTDKVIYLMS

SEQ ID NO: 4493 - protein, 177 aa, Homo sapiens [sequence omitted]

SEQ ID NO: 4494 - protein, 141 aa, Homo sapiens
MTSSAPTLPDVTIRNVSRHIQMSLMGKGEPPWLCRLQLEPLLQAMEEQQLGNLEARWEVEKHGNEVSGSTSREVWEDADFICPVLKQCTNPKLNENKNIHQAKECEKSPFLSLSPHQQWKPGLPRRNDALPTSLCLCCSEN

SEQ ID NO: 4495 - protein, 126 aa, Homo sapiens
MYPSRMGWFFAICMPYSFLHFVFFLAFYSLYVCVSFCQAVIHMHTCFFLIWENFYVVLMGNIFNTPLSLPKFVFLLSPSLKAVYCWSGGKEKGKVVIQRAKWGNVAFRLCSLEVPSISLLGLPKCL

SEQ ID NO: 4496 - protein, 411 aa, Homo sapiens
MLSLREQQLQVWFKNRRAKLARERRLQQQPQRVPGQRGRGARAAPLVPAASASAPQRGPSGILPAAEPTICSLHQAWGGPGCRAQKGIPAALSPGPGPIPAPIPGPAQIPGPLPGSIPGPIPGPAQIPSPIPAPIPGPISGPVQIPGPFRGPIPGPISGPAPIPGPISGPFSGPNPGPIPGPNPGPIPGPISGPIPGPISVPIPGLIPGPISGPISGPNPGPIPGPIPGPISGPNPGPIPGPISGPNPGLIPGPIPGPISGPGPIIGPIPSPAQIPGPGRLQGPGPILSPGRMRSPGSLPGLALILGPGSGPGSGSVPAPIPGPGSLPAPAPLWPQSPDASDFLPDTQLFPHFTELLLPLDPLEGSSVSTMTSQYQEGDDSMGKKHSGSQPQEEGGSVNENHSGPRLLLDL

SEQ ID NO: 4497 - protein, 503 aa, Homo sapiens
MGFKAHFRKAQALATLGKVEEALREFLYCVSLDGKNKRARCEAQRLLLSFFSPSVPGDSQEHSPDILKLLAPHPRLKENVESMTTEVTSHNLPRLLQDNLELPHCSSQEEAAARGDGSSLMDPAKVKGDGQQHHMKDQEEEEEKWDATSPKAASSKTGKCQEKKRKHCQIESQEETGMPNKASKQDPPTDQGDKPALSLPLASFDASDLECALCMRLFYEPVTTPCGHTFCLKCLERCLDHNAKCPLCKDGLSQCLASRKYSKNVIMEELIAKFLPEELKERRKLYEEEMEELSNLNKNVPIFVCTMAYPTVPCPLHIFEPCYRLMIRRCIETGTRQFGMCLGDPVKGFAEYGCILEIRNVQFFADGRSVVDSIGKRRFRVLHQSQRDGYNTADIEYIEDQKVQGEDCAELMGLHNCVYQQASLWFHSLKLSLKNRILNHFGPMPEKDADPQMNPNGPAWCWWMLAVLPLESRAQLPFLAMRSLKDRLNGIRRVLAFISRNQN

SEQ ID NO: 4498 - protein, 630 aa, Homo sapiens
MEIGHPHEGKDDLGDKRVIMGTKFPMELGIRVGLGKEDSRCGESPVVSNKCEGRMAPPETKFPLSKGLEMGLERQNISRTVMQRGSLGVDSVSASQGTKPSLLPGRMGLENESLLAGYTHERIIQPPLGRVCGSSQAAGSRRAPLASGPEGVEELVGKPAFVMEPRQEMEKESTCVLMKPNTEIKLPVEVDIGLTQAEGPDETKNTEPQMGLVIEPPQCQFAQQHEQRKEAGNIESGVEPPDRIRPIYSGKFFDRTPCWPSAGKVIPVGYRVATCLTEKLPRLITPPEAKKYFNFRYPPAGVERVFYGRANDPQIAPYLTHGIRSKISILANTLINPQPITTFQQKIKDKKESIYLSNRRAPLGKSHDQAPGLPKGMDTTNTTFGTAVIKEYSAKDVVNPPKSYEEVFKEGNEGHDLYVVSHNDYYAGEAKNRKYNPSSFHRCSVYGVPTPHFNDGRAMAKSLYWLHELQMKRGAKFVSKRADDFKEKFRHKLGRVLDPIAETMNVPPDCTFGACLRPEEYGVGDLIHNRLPDEYLRGKDRQRALIAAVRHHLKKVNYQKFDTLLAAFRHYDKAGVQWRDLGSLQPPPPRFKRFSCLSLPSSWDYRHLPPHPNFRIFSRDGVSPCWPGWS

SEQ ID NO: 4499 - protein, 152 aa, Homo sapiens [sequence omitted]

SEQ ID NO: 4500 - protein, 223 aa, Homo sapiens
MMMMMMLMITSNPSPSRNLKVMLGNFKSRVRDGTEQTINPIQIVRYWNYSHSAPQDDLMLIKLAKPAMLNPKVQPLPLATTNVRPGTVCLLSGLDWSQENSGLWQLEPPGHLTLHRGPAIPDWQRHNSHEQGRHPDLRQNLEAPVMSDRECQKTEQGKSHRNSLCVKFVKVFSRIFGEVAVATVICKDKLQGIEVGHFMGGDVGIYTNVYKYVSWIENTAKDK

SEQ ID NO: 4501 - protein, 262 aa, Homo sapiens
MEPGRRGAAALLALLCVACALRAGRAQYERYSFRSFPRDELMPLESAYRHALDKYSGEHWAESVGYLEISLRLHRLLRDSEAFCHRNCSAAPQPEPAAGLASYPELRLFGGLLRRAHCLKRCKQGLPAFRQSQPSREVLADFQRREPYKFLQFAYFKANNLPKAIAAAHTFLLKHPDDEMMKRNMAYYKSLPGAEDYLKTWKPSHMKACSSEQCGHTTVRTGEHPSQTWSWPFPTSSKPFTSVSQPARVPGRSRTSRISTFP

SEQ ID NO: 4502 - protein, 437 aa, Homo sapiens
MFPQDSSYYSIANKELYLPRNGQRLGKDKNDLSSTLESLTNSLMDKLSESDEIMLKSFLKNIFNVFFKYNHSERRGQPEKELERLIQPSFTSDTEHLEELQEDFDKADKLDRKPILSPKLRVFLEELSESEVKHLKSELSKQIQHYLVERLSESGHITKEDLPKIYQNLYLMNEKAEQKGPNSFQGKYSETVKEIMSFVNNFNHHFIDKHLEIKLRSFLKEILQNYFLKNISESSLFNETASETIYPNISSLRTKSVSISFHELEQDISKGSFGRRFEINMKYPLSKSLQNYLIALSENELLHLKADLSKHLQSLFIEKLSKSGLMTKKQLEGINQHINLLNSSSIPLKYIKTHLPFRDDCHFVEKHSEKQNKYSRIVQQTTLQTVSEDKLREAELIREKEKKYFPLQNLKGNSSLIKEQKSYYTKEEAKTPSLIKV

SEQ ID NO: 4503 - protein, 210 aa, Homo sapiens
MTHMITHIGEKTSEDNQSGKALRKNFPHSFYKKSHAEGKMPKCVKHEKAFNQFPNLTRQNKTHTQEKLCECKDCWRTFLNQSSLKLHIRSHNGDKHYVCKECGKAFSNSSHLIGHGRIHSGEKPYVCKECGKAFTQSTGLKLHIRTHSGEKPYKCKECGKAFTHSSYLTDHTRIHSGKKPYVCMECGKAFTRSTGLILHMRIHTGEKPYE

SEQ ID NO: 4504 - protein, 365 aa, Homo sapiens
MQHTCTQQKKSEDSPSPKRQRLSHSVFDYTSASPAPSPPMRPWEMTSNRQPPSVRPSQHHFSGERCNTPARNRRSPPVRRQRGRRDRLSRHNSISQDENYHHLPYAQQQAIEEPRAFHPPNVSPRLLHPAAHPPQQNAVMVDIHDQLHQGTVPVSYTVTTVAPHGIPLCTGQHIPACSTQQVPGCSVVFSGQHLPVCSVPPPMLQACSVQHLPVPYAAFPPLISSDPFLIHPPHLSPHHPPHLPPPGQFVPFQTQQSRSPLQRIENEVELLGEHLPVGGFTYPPSAHPPTLPPSAPLQFLTHDPLHQEVSFGVPYPPFMPRRLTGRSRYRSQQQYHLPLIIPAYCHMCYQCFQCHLQWAQLSALN

SEQ ID NO: 4505 - protein, 553 aa, Homo sapiens
MDVDKELGMESVKAGASGKPEMRLGTQEETSEGDANESSLLVLSSNVPLLALEFLEIAQAKEKAFLPMVSHTFHMRTEESDASQEGDDLPKSSANTSHPKQDDSPKSSEETIQPKEGDIPKAPEETIQSKKEDLPKSSEKAIQPKESNIPKSSAKPIQPKLGNIPKASVKPSQPKEGDIPKAPEETIQSKKEDLPKSSEEAIQPKEGDIPKSSAKPIQPKLGNIAKTSVKPSQPKESDIPKSPEETIQPKEGDIPKSSAKPIQPKLGNIPKASVKPSQPKEGDISKSPEEAIQPKEGDLPKSLEEAIQPKEGDIPKSPEEAIQPKEGDIPKSLEEAIQPKKGDIPKSPEETIQPKKDDIPKSPEEAIQPKEGDIPKSPKQAIQPKEGDIPKSLEEAIPPKEIDIPKSPEETIQPKEDDSPKSLEEATPSKEGDILKPEEETMEFPEGDKVKVILSKEDFEASLKEAGERLVAVDFSATWCGPCRTITPFFHALSVKHEDVVFLEVDADNCEEVVRECAIMCVPTFQFYKKEEKVDELCGALKEKLEAVIAELK

SEQ ID NO: 4506 - protein, 332 aa, Homo sapiens
MSEAGEEQPMETTGATENGHEAVPEGESPAGAGTGAAAGAGGATAAPPSGNQNGAEGDQINASKNEEDAGKMFVGGLSWDTSKKDLKDYFTKFGEVVDCTIKMDPNTGRSRGFGFILFKDAASVEKVLDQKEHRLDGRVIDPKKAMAMKKDPVKKIFVGGLNPEATEEKIREYFGEFGEIEAIELPMDPKLNKRRGFVFITFKEEEPVKKVLEKKFHTVSGSKCEIKVAQPKEVYQQQQYGSGGRGNRNRGNRGSGGGGGGGGQSQSWNQGYGNYWNQGYGYQQGYGPGYGGYDYSPYGYYGYGPGYDYSQGSTNYGKSQRRGGHQNNYKPY

SEQ ID NO: 4507 - protein, 181 aa, Homo sapiens
MGGRSAQAGLGTRITPMMELKPNAGSDRAWVWNTHADFADECPKPELLAIRFLNAENAQKFKTKFEECRKEIEEREKKGDVVPWVGGLLCRLTLHLTILPGGCFFCLPDKHSRVLWPPHVSRVMQLPGDTGASWGALSTCQCCWPQSNWAGIGVRALPGAHQKVLYDGPRFVSQRAWSPLP

SEQ ID NO: 4508 - protein, 531 aa, Homo sapiens
METKVHLFCQAEENIDLLDDGSNSFATDLSSGTINHKKYIKFSKTIEKEISPEIRSLSPEYKKIFETSIIFCGEEKSSDFSGEKKVGRKSLQVQQHSKRTEIIPPFLKLSKEKVTRKENSLCKLPNQYSVHKTSSPLCTSSAITREKEMLSNLYMTLYDEVTHGYLHSKELSAFQDALKIFCRIKGGRVSTDDVFAVLDSMGIPINREILEEVTKHTYIDSNHMVDIGDIIFTLNELQEQYEDVSITEGSPLNEITSDRKLSSVAGCYLKYKKKNSLSSKLPEPSISKKLNKKSNQYYSKIMENDDLESKRPKNTWQIRKFLGGVGSSNVGVQEPYSKNGINFKKHSEKGEIHDSKSKPQSLKSSTSLSKSLDKSDISSIPKLQKPAVRKHSSLQKQVSSTEKTAISTLENFCEAISKLQENYIAAEELQSILPSTGINLLDEEFQKIVTDTSRNENGMVELDDFVNALAKERSFPECNALPGVIKAIDKIKDKNVDYEDLNTCLQNFGIYLSKPEFKKITELTEAGETKK

SEQ ID NO: 4509 - protein, 128 aa, Homo sapiens
MYKSWTLGDLKEKEGVGNILEETKRTQNNTEQASRAINSPLQSPYTDSMKALAISSHWFLPQIHTLPPITKATRHRWPPACCGRRGGQTTLPPLTPIVRACESMERSCPGNYPMQHEGKVMQRHPTLR

SEQ ID NO: 4510 - protein, 682 aa, Homo sapiens
MNPPAAFLAGRQNIGSEVEISTIEKQRKELQLLIGELKDRDKELNDMVAVHQQQLLSWEEDRQKVLTLEERCSKLEGELHKRTEIIRSLTKKVKALESNQMECQTALQKTQLQLQEMAQKATHSSLLSEDLEARNETLSNTLVELSAQVGQLQAREQALTTMIKLKDKDIIEAVNHIADCSGKFKMLEHALRDAKMAETCIVKEKQDYKQKLKALKIEVNKLKEDLNEKTTENNEQREEIIRLKQEKSCLHDELLFTVEREKRKDELLNIAKSKQERTNSELHNLRQIYVKQQSDLQFLNFNVENSQELIQMYDSKMEESKALDSSRDMCLSDLENNHPKVDIKREKNQKSLFKDQKFEAMLVQQNRSDKSSCDECKEKKQQIDTVFGEKSVITLSSIFTKDLVEKHNLPWSLGGKTQIEPENKITLCKIHTKSPKCHGTGVQNEGKQPSETPTLSDEKQWHDVSVYLGLTNCPSSKHPEKLDVECQDQMERSEISCCQKNEACLGESGMCDSKCCHPSNFIIEAPGHMSDVEWMSIFKPSKMQRIVRLKSGCTCSESICGTQHDSPASELIAIQDSHSLGSSKSALREDETESSSNKKNSPTSLLIYKDAPAFNEKASIVLPSQDDFSPTSKLQRLLAESRQMVTDLELSTLLPISHENLTGSATNISHLCGRQKADTNTE

SEQ ID NO: 4511 - protein, 330 aa, Homo sapiens [sequence omitted]

SEQ ID NO: 4512 - protein, 259 aa, Homo sapiens
MIQPRLLADAIVLFTSSQEEVTLAVTPLNFCLKSSNEESMDLSNAVHSEMFVGSDEFDFFQIGMDTEITFYFKELKGILTFSEATHAPISIYFDFPGKPLALSIDDMLVEANFILATLADEQSRASSPQSLCLSQKRKRSDLIEKKAGKNVTGQALECISKKAAPRRLYPKETLTNISALENCGSPAMKRVDGDVSEVSESSVSNTEEVPGSLCLRKFSCMFFGAVSSDQQEHFNHPFDSLARASDSEEDMNNGSFSIF

SEQ ID NO: 4513 - protein, 406 aa, Homo sapiens [sequence omitted]

SEQ ID NO: 4514 - protein, 474 aa, Homo sapiens [sequence omitted]

SEQ ID NO: 4515 - protein, 487 aa, Homo sapiens
MELRSYQWEVIMPALEGKNIIIWLPTGAGKTRAAAYVAKRHLETVDGAKVVVLVNRVHLVTQHGEEFRRMLDGRWTVTTLSGDMGPRAGFGHLARCHHTHKDTVYNVIMSQYLELKLQRAQPLPQVLGLTASPGTGGASKLDGAINHVLQLCANLDTWCIMSPQNCCPQLQEHSQQPCKQYNLCHRRSQDPFGDLLKKLMDQIHDHLEMPELSRKFGTQMYEQQVVKLSEAAALAGLQEQRVYALHLRRYNDALLIHDTVRAVDALAALQDFYHREHVTKTQILCAERRLLALFDDRKNELAHLATHGPENPKLEMLEKILQRQFSSSNSPRGIIFTRTRQSAHSLLLWLQQQQGLQTVDIRAQLLIGAGNSSQSTHMTQRDQQEVIQKFQDGTLNLLVATSVAEEGLDIPHCNVVVRYGLLTNEISMVQARGRARADQSVYAFVATEGSRELKRELINEALETLMEQAVAAVQKMDQAEYQAKELL

SEQ ID NO: 4516 - protein, 349 aa, Homo sapiens [sequence omitted]

SEQ ID NO: 4517 - protein, 118 aa, Homo sapiens
MGILVVPRTRWSWPDGPDEPTTYSSDTFYYPGSNLNVSCLAGSNPSVEHSWLLNGNNQQTGQELFISQVTTENSGDYLCYVHNPVTNGKNFATKKIRVPDTSVQEVLLAFQVEPLSAS

SEQ ID NO: 4518 - protein, 102 aa, Homo sapiens
MRDGAGAGLRATRFRWMRDGAGAGLRASRFMYMRDEAAQELAQPEVSSAAFQASFCVSCTQQSSHAAGWLRVLRTSHPYFREKTAHITQLCMENLPPGGVAS

SEQ ID NO: 4519 - protein, 114 aa, Homo sapiens
MAEEMLPPPELLPAHPDWLSALRPSVSASCLPGLPVGDLCRYCHLENPESGRDHRGTPSRALPMEPTLAAMSLQPSSQKYILRKRCHIYYTQRSLKPHVHIVSTSIEQLIFAGT

SEQ ID NO: 4520 - protein, 106 aa, Homo sapiens [sequence omitted]

SEQ ID NO: 4521 - protein, 677 aa, Homo sapiens
MAYLQQKELDLIDYKFGERKKDGDPDSQEQQLLDFSEPDCPSSSANSRKDKSLRIMSQKFVMLFLVSKTKIVTLDVAAKILIEESQDAPDHSKFKTKVRRLYDIANVLTSLALIKKVHVTEERGRKPAFKWIGPVDFSSSDEELVDVSASVLPELKRETYGQIQVCAKQKLARHGSFNTVQASERIQRKVNSEPSSPYREEQGSGGYSLEIGSLAAVYRQKIEDNSQGKAFASKRVVPPSSSLDPVAPFPVLSVDPEYCVNPLAHPVFSVAQTDLQAFSMQNGLNGQVDVSLASAASAVESLKPALLAGQPLVYVPSASLFMLYGSLQEGPASGSGSERDDRSSEAPATVELSSAPSAQKRLCEERKPQEEDEPATKRQSREYEDGPLSLVMPKKPSDSTDLASPKTMGNRASIPLKDIHVNGQLPAAEEISGKATANSLVSSEWGNPSRNTDVEKPSKENESTKEPSLLQYLCVQSPAGLNGFNVLLSGSQTPPTVGPSSGQLPSFSVPCMVLPSPPLGPFPVLYSPAMPGPVSSTLGALPNTGPVNFSLPGLGSIAQLLVGPTAVVNPKSSTLPSADPQLQSQPSLNLSPVMSRSHSVVQQPESPVYVGHPVSVVKLHQSPVPVTPKSIQRTHRETFFKTPGSLGDPVLKRRERNQSRNTSSAQRRLEIPSGGAD

SEQ ID NO: 4522 - protein, 222 aa, Homo sapiens
MKRLNEIVDAANAVISHIDQTALAVYIAMKTDPRPDAATIKKLPSDFCIIPALLWAARIHQAAFAESALQTLAERRMKGVLRHSDMDKQKSTLVDALCRKGCALADHLLHTQAQDGAISTDAEGKEEEGESPLDSLAETFWETTKWTDLFDNKVLTFAYKHALVNKMYGRGLKFATKLVEEKPTKENWKNCIQLMKLLGWTHCASFTENWLPIMYPPDYCVF

SEQ ID NO: 4523 - protein, 455 aa, Homo sapiens
MRGPRPRPAGDSPRKTQWLNQVESYIAEQRRGDRMRPQAPGRGWHGEEEVVAAAGQEGQVEGEEEGEEEEEEEDMSEVFEYVPVFDPVVNWDQTFSARNLDFQALRTDWIDLSCNTSGNLLLPEQEALEVTRVFLKKLNQRSRGRYQLQRIVNVEKRQDQLRGGRYLLELELLEQGQRVVRLSEYVSARGWQGIDPAGGEEVEARNLQGLVWDPHNRRRQVLNTRAQEPKLCWPQGFSWSHRAVVHFVVPVKNQARWVQQFIKDMENLFQVTGDPHFNIVITDYSSEDMDVEMALKRSKLRSYQYVKLSGNFERSAGLQAGIDLVKDPHSIIFLCDLHIHFPAGVIDAIRKHCVEGKMAFAPMVMRLHCGATPQWPEGYWEVNGFGLLGIYKSDLDRIGGMNTKEFRDRWGGEDWELLDRILQAGLDVERLSLRNFFHHFHSKRGMWSRRQMKTL

SEQ ID NO: 4524 - protein, 235 aa, Homo sapiens
MPSGLCAHLFGLSDCPVLSGSGAVYRVCAGTATFHLLQAVLLVHLHSPTSPRAQLHNSFWLLKLLFLLGLCAIAFCIPDEHLFPAWHYIGICGGFAFILLQLVLITAFAHSWNKNWQTGAAQDCSWFLAVLLATLGFYSMAGVGAVLLFHYYTHPAGCLLNKMLLSLHLCFCGLISFLSIAPCIRLSGATPLWPPTSFCHQLLYHISDFLCTVQPSSRESNPSRTESHPVPAWPE

SEQ ID NO: 4525 - protein, 102 aa, Homo sapiens
MHMTVLIPPGCGENGDSKHDVHFTERYQFGGLFPFYLQKWLSLPPKQTLDSQVDGVPFAQGETLQPTLSLYLPLSEHGIHSGASVGICLLCSIFPPHCWVCT

SEQ ID NO: 4526 - protein, 499 aa, Homo sapiens
MRVLVPPAERSQDTRVGAPAWREAAQAMARTAHILTDRCGQEAVTMWQPKDSVLDPNVAHHLGRAAYIQPWRFRVEMIKGGGTLEKPPPGEGVTLWKGKMKPPAWYARLPLPLHRKARALQTTEVVHAHARGARLTAARLGRAQHQINGRVRQLLRQREVTDHRLSEVRKGLLINQQSVKLRGYRPKSEKVPDKADSMLTWEKEELKSMKRKMERDMEKSEVLLKTLASCRDTLNFCFKERLQAVDLMNQPLDKVLEQARRHSWVNLSRAPTPRTQGQKTPPPDPVGTYNPACALALNEAKRLLVESKDTLVEMAKNEVDVREQQLQISDRVCASLAQKASETLELKERLNMTLGLMRGTILRCTKYNQELYTTHGLIKGPLSKVHLETAEKLDRPLVRMYQRHVGTQLPEAARLAQGTDKLQCHITYLEKNLDELLATHKNLSWGLNCKNIGHEVDGNVVRLRLRQRQPHVCYEQAQRLVKDWDPRTPPPRSKSSADP

SEQ ID NO: 4527 - protein, 104 aa, Homo sapiens
MGRIPGGCSSKAFIGRAQWLTPVIPALWEAKGLTLLSRLECSDVIMDHCSPQLTGLRMKGFLAQTPPLEFPVHQYQPGDHVLIKSWKRESLNQLRRTSSGTLDE

SEQ ID NO: 4528 - protein, 284 aa, Homo sapiens [sequence omitted]

SEQ ID NO: 4529 - protein, 241 aa, Homo sapiens
MDGVPSLELGLPRKQSEMQMKAGVTCEVCMNVVQKLDHWLMSNSSELMITHALERVCSVMPASITKECIILVDTYSPSLVQLVAKITPEKVCKFIRLCGNRRRARAVHDAYAIVPSPEWDAENQGSFCNGCKRLLTVSSHNLESKSTKRDILVAFKGGCSILPLPYMIQCKHFVTQYEPVLIESLKDMMDPVAVCKKVGACHGPRTPLLGTDQCALGPSFWCRSQEAAKLCNAVQHCQKHV

SEQ ID NO: 4530 - protein, 547 aa, Homo sapiens [sequence omitted]

SEQ ID NO: 4531 - protein, 134 aa, Homo sapiens [sequence omitted]

SEQ ID NO: 4532 - protein, 116 aa, Homo sapiens
MGESRSHPAPQSRIETLPLPTACCREVHCGGHFLERRNRLNTKLLKPCSSICQGNGGPECQSPSHPARENSGGAQGVQPLSTQPPWSRLIRARGQAEPPTRNRVSTKQEAKNVSPT

SEQ ID NO: 4533 - protein, 120 aa, Homo sapiens
MLRSFSQRIPSNLWDGNNSHFTDIKQAPKLFEVPLLIMTSQASGVQTHKFRPPVLGFSAMATISVLKLPPPLAVLCDFSSWLHWFWLVLSLLFQGHGPLRVITRTLCFLCVPRRGLSHCL

SEQ ID NO: 4534 - protein, 415 aa, Homo sapiens
MESLRGYTHSDIGYRSLAVDEDIEEVNDEKLTVTSLMARGGEDEENTRSKPEYGTEAENNVGTEGSVPSDDQDREGGGGHEPEQQQEEPPLTKPEQQQEEPPLLELKQEQEEPPQTTVEGPQPAEGPQTAEGPQPPERKRRRRTAFTQFQLQELENFFDESQYPDVVARERLAARLNLTEDRVQVWFQNRRAKWKRNQRVLMLRNTATADLAHPLDMFLGGAYYAAPALDPALCVHLVPQLPRPPVLPVPPMPPRPPMVPMPPRPPIAPMPPMAPVPPGSRMAPVPPGPRMAPVPPWPPMAPVPPWPPMAPVPTGPPMAPVPPGPPMARVPPGPPMARVPPGPPMARVPPGPPMAPLPPGPPMAPLPPGPPMAPLPPGPPMAPLPPRSHVPHTGLAPVHITWAPVINSYYACPFF

SEQ ID NO: 4535 - protein, 237 aa, Homo sapiens [sequence omitted]

SEQ ID NO: 4536 - protein, 463 aa, Homo sapiens [sequence omitted]

SEQ ID NO: 4537 - protein, 101 aa, Homo sapiens [sequence omitted]

SEQ ID NO: 4538 - protein, 551 aa, Homo sapiens
MEGAAPCRVSLKVSLGQRCWERAWRFDLGMGVVSSLTSHPLQNIAESGRPQLEAHLETRGGGHVGRRFCFSPGENSKTMSTELFSSTREEGSSGSGPSFRSNQRKMLNLLLERDTSFTVCPDVPRTPVGKFLGDSANLSILSGGTPKRCLDLSNLSSGEITATQLTTSADLDETGHLDSSGLQEVHLAGMNHDQHLMKCSPAQLLCSTPNGLDRGHRKRDAMCSSSANKENDNGNLVDSEMKYLGSPITTVPKLDKNPNLGEDQAEEISDELMEFSLKDQEAKVSRSGLYRSPSMPENLNRPRLKQVEKFKDNTIPDKVKKKYFSGQGKLRKGLCLKKTVSLCDITITQMLEEDSNQGHLIGDFSKVCALPTVSGKHQDLKYVNPETVAALLSGKFQGLIEKFYVIDCRYPYEYLGGHIQGALNLYSQEELFNFFLKKPIVPLDTQKRIIIVFHCEFSSERGPRMCRCLREEDRSLNQYPALYYPELYILKGGYRDFFPEYMELCEPQSYCPMHHQDHKTELLRCRSQSKVQEGERQLREQIALLVKDMSP

SEQ ID NO: 4539 - protein, 122 aa, Homo sapiens
MKKQGVSPKPLQSSRPSPSKRPCGASPAREREVEKSALGGGKLPGGARRSSPGRIPNLKKRKGLELKVVAKALLGPFQFVCNSLAQLREEVHELQARWFPSRTTLHRRLCGNSTLVTFSNTF

SEQ ID NO: 4540 - protein, 107 aa, Homo sapiens [sequence omitted]

SEQ ID NO: 4541 - protein, 523 aa, Homo sapiens [sequence omitted]

SEQ ID NO: 4542 - protein, 300 aa, Homo sapiens [sequence omitted]

SEQ ID NO: 4543 - protein, 494 aa, Homo sapiens
MKWEFTSWVPLVSKICPSDTYKVWKSGQNLRVDTTLLGFDHMTWQRGNRSFVFRGQDTSAVVMEIDHDRRVVYTETLALAGQDRELLLAAAQPTEEQVLSRLTAPVVTTQLDTKNISFERNKTGILGWRSEKTEMVNGYEAKVYGASNVELITRTRTEHLSEQHKGKVKGCETPLQSFLGIAEQHGGPQNGTLITQTLSRANPTAITAEEYFNPNFELGNRDMGRPMELTTKTQKFKAKLWLCEEHPLSLCEQVAPIIDLMAVSNALFAKLRDFITLRLPPGFPVKIEIPIFHILNARITFGNLNGCDEPVPSVRGSPSSETPSPGSDSSSVSSSSSTTSCRGCEISPALFEAPRGYSMMGGQREAATRDDDDDLLQFAIQQSLLEAGSEYDQVTIWEALTNSKPGTHPMSYEGRRQDRSAPPTPQRQPAPPASVPSPRPSSGPGSGGHVFRSYDEQLRLAMELSAQEQEERRRRARQEEEELERILRLSLTEQ

SEQ ID NO: 4544 - protein, 100 aa, Homo sapiens [sequence omitted]

SEQ ID NO: 4545 - protein, 703 aa, Homo sapiens
MLSDDHVNEIIIQVENVSSGVQSHPSSNQIFQEKVLLDSSINMVLSISDIDVIDSQTVSKRNDQKGNQVLRFSTSLNESMSQTLHSLECMGIDTPGSSHETVQGQKLIASLIPMTSRDRIKAIRNQPRTMEEKRNLRKIVDKEKSKQTHRILQLNCCIQCLNSISRAYRRSKNSLSEILNSISLWQKTLKIIGGKFGTSVLSYFNFLRWLLKFNIFSFILNFSFIIIPQFTVAKKNTLQFTGLEFFTGVGYFRDTVMYYGFYTNSTIQHGNSGASYNMQLAYIFTIGACLTTCFFSLLFSMAKYFRNNFINPHIYSGGITKLIFCWDFTVTHEKAVKLKQKNLSTEIRENLSELRQENSKLTFNQLLTRFSAYMVAWVVSTGVAIACCAAVYYLAEYNLEFLKTHSNPGAVLLLPFVVSCINLAVPCIYSMFRLVERYEMPRHEVYVLLIRNIFLKISIIGILCYYWLNTVALSGEECWETLIGQDIYRLLLMDFVFSLVNSFLGEFLRRIIGMQLITSLGLQEFDIARNVLELIYAQTLVWIGIFFCPLLPFIQMIMLFIMFYSKNISLMMNFQPPSKAWRASQMMTFFIFLLFFPSFTGVLCTLAITIWRLKPSADCGPFRGLPLFIHSIYSWIDTLSTRPGYLWVVWIYRNLIGSVHFFFILTLIVLIITYLYWQITEGRKIMIRLLHEQIINVSPLGSL

SEQ ID NO: 4546 - protein, 323 aa, Homo sapiens [sequence omitted]

SEQ ID NO: 4547 - protein, 345 aa, Homo sapiens
MQHVSSSQSSQRHVQWPGACPGAGEEQPACSQPSLPLTLPSPSHQLQQLMDGSGLTQIAQGAQVQLQHPGTPITVRERRPSQPHTQSGGTIHHLGPQSPAAAGGAGLQPLASPSHITTANLPPLPRPLGFERTPGVLLPGAGGAAGFGMTSPPPPTSPSRTAVPPGLSSLPLTSVGNTGMKKVPKKLEEIPPASPEMAQMRKQCLDYHHQEMQALKEVFKEYLIELFFLQHFQGNMMDFLAFKERLYGPLQAYLRQNDLDIEEEEEEHFEVINDEVKVVARKHGQPGTPVAIATQLPPRTSAAFPAQQQPLQPLAPTTVLSVSADWNALLQRPNKYIWGLQYLEM

SEQ ID NO: 4548 - protein, 290 aa, Homo sapiens
MLGQRAGDGERPGLPGDGEGGVPARPGRRAERPPQRPAKVNKAVTCAAHLPGAAASRPLSPNKPDRVRPGQRDRIGAKRQRRRRADAGQARAASSRRVVPTAPEVLGAVASLPDRGRPTVARVATGSRLEGLFSAASLKLSALTQSLTRVRQAPTASGATIRLPASPVEMFLTSAFLTGFSFHCLYSGIGHGEDILASVEQITIVSRPLSGQRGAGPGNSAYTPRRSQGGPRAATTPGFRFPCRGLVRRAVLRLTVTVQDCILTALLAVSFHSIGVVIMTSSYLLGPVVK

SEQ ID NO: 4549 - protein, 390 aa, Homo sapiens
MADNLQATFGESLLSDMLDDFPDTLPSPEALKFKILVKNKKIGTLKETHERKGSDKRGKVEEWEEEVADGEEEEEEEEEEEEEEEDKFKESEVLESVLGDNQDKETGVKKLPGVMLFKKKKTRKLKIALALSDLVIYTKAEKFKSFQHSRLYQQFNENNSIGETQARKLSKLRVHEFIFHTRKFITRIYPKATRADSSNFNPQEFWNIGCQMVALNFQTPGLPMDLQNGKFLDNGGSGYILKPHFLRESKSYFNPSNIKEGMPITLTIRLISGIQLPLTHSSSNKGDSLVIIEVFGVPNDQMKQQTRVIKKNAFSPRWNETFTFIIHVPELALIRFVVEGQGLIAGNEFLGQYTLPLLCMNKGYRRIPLFSRMGESLEPASLFVYVWYVR

SEQ ID NO: 4550 - protein, 246 aa, Homo sapiens
MNVITIEDYKSTYWPKLDGAIDQLLTQSPGDYIPISYEQIYSCVYKCVCQQHSEQMYSDLIKKITNHLERVSKELQASPPDLYIERFNIALGQYMGALQSIVPLFIYMNKFYIETKLNRDLKDDLIKLFTEHVAEKHIYSLMPLLLEAQSTPFQVTPSTMANIVKGLYTLRPEWVQMAPTLFSKFIPNILPPAVESELSEYAAQDQKFQRELIQNGFTRGDQSRKRAGDELAYNSSSACASSRGYR

SEQ ID NO: 4551 - protein, 471 aa, Homo sapiens
MLCEGEAQKRKAEESGMPLTQGHLTFRDVAIEFSQEEWKCLDPVQKALYRDVMLENYRNLVSLGICLPDLSIISMMKQRTEPWTVENEMKVAKNPDRWEGIKDINTGRSCAVRSKAGNKPITNQLGLTFQLPLPELEIFQGEGKIYECNQVQKFISHSSSVSPLQRIYSGVKTHIFNKHRNDFVDFPLLSQEQKAHIRRKPYECNEQGKVFRVSSSLPNHQVIHTADKPNRCHECGKTVRDKSGLAEHWRIRTGEKPYKCKECSKLFNRIAYLARHEKVHTGESPYKCNECGKVFSRITYLVRHQKIHTREKPHKCNKCGKVYSSSSYLAQHWRIHTGEKLYKCNKCGKEFSGHSSLTTHLLIHTGEKPYKCKECGKAFRHKFSLTVHQRNHNGEKPYKCHECGKVFTQVSHLARHQKIHTGEKPYKCNECGKVFTQNSHLANHQRIHTGEKPYKCHVCGLSLWSGKESVR

SEQ ID NO: 4552 - protein, 643 aa, Homo sapiens
MMQATAVVETASGKGYHSNGGNLQKDKPSNPKKENLLLSSNGCDEVKLTFPDDDWNSSTLEQRANNKEISNIDKMDLLEPFFSVSQDTNTESTQFQSSELEDSTDYAFLNKTYSIPYSESKLKKESLTPLSSELDPEVQKKEEVFFNILEHQDKTVGLERIYNISDANYRESAEDTQKHDTDEDSQQEYHSAEEQEYISNHLSFDQTKALDISNPEVVELGNSGYEVRCASNVEDNRVNSGSGSIISFDSLDVYGQEESLHVSKFQNSVMLREYHDLKHEKYKEQETNSMYHTVFDGSVLRSNSPGNQESQSKSGSLSPQKVLKMKIYTENMKSQINEGKDFCGNKIVENKILLHLENPSTLPQDKALETLLQPCKDCQTSWTSVFDDSIISACGYYESLQNTADSALDFSAMLPKIAVRDNQAIEDNTSLKVAHSSTTKKTCFHNIGEMCTKSLTDAASCTVTINQTVDVSTDFRACFTTSRATSARPSVVSTSSNTEITMMNKKRPDEWQNEKQKSVACSTDWSYSEDCIDTQMAITKGSGKSLSVDSLKPNGNFLNKDFLELRKACGITDLKKHPEREFQLFKDTEKDLPSMCCQKIMQRAIKAELHLLNVHYQMCRRHCCDIYKLVMENREGLNMCLLI

SEQ ID NO: 4553 - protein, 103 aa, Homo sapiens [sequence omitted]

SEQ ID NO: 4554 - protein, 351 aa, Homo sapiens [sequence omitted]

SEQ ID NO: 4555 - protein, 212 aa, Homo sapiens
MMYMHNTVSLEEELKKANAARTQLETYKRQVQDLHVKLSSESKRADTLAFEMKRLEEKHEALLKEKERLIEQRDTLKETNEELRCSQVQQDHLNQTDASATKSYENLAAEIMPVEYREVFIRLQHENKMLRLQQEGSENERIEELQGQLEQKHRKMNELETEQRLSKERIRELQQQIEDLQKSLQEQGSKSEGESYKRSMNLKLLFRRKMKI

SEQ ID NO: 4556 - protein, 189 aa, Homo sapiens
MSTVKEAAHRLSKSEMSLYAVLDLKKGASPEDFKKSYSHSALLPHPPFEYHLGRKLALRYHPDKNPGNAQAAEIFKEINAAHAILSDSKKRKIYDQHGSLGIYLYDHFGEEGVRYYFILNSCWFKTLVILCTLLTCCCFCCCCCFCCGALKPPPEQDSGRKYQQNVQSQPPRSGAKCDFRSEENSEDDF

SEQ ID NO: 4557 - protein, 317 aa, Homo sapiens
MKRLSLVTTNRLSPQGNFLPLCTFPLAVDMAALFQEASSCPVCSDYLEKPMSLECGCTVCLKCINSLQKEPHGEDLLCCCCSMVSQRNKIRPNRQLERLVSHIKELEPKLKKILQMNPRMRKFQVDMTLDADTANNFLLISDDLRSVRSGLITQNRQDLAERFDVSVCILGSPRFTCGRHYWEVDVGTSTEWDLGVCRESVHCKGKIQLTTELGFWTVSLRDGSRLSASTVPLTFLLVDRKLQRVGIFLDMGMQNVSFFDAESGSHVYTFRSVSAEEPLRPFLAPSIPPNGDQGVLSICPLMNSGTTDAPVRPGEAK

SEQ ID NO: 4558 - protein, 103 aa, Homo sapiens [sequence omitted]

SEQ ID NO: 4559 - protein, 109 aa, Homo sapiens
MGPHSWPVSLWPFPFFLPLCVMETRLDLAREQRTPKISRIFPSKDPGWLCFYFSGDHSRYWQFSVMALGSFKEQERGICTNLEPQSSTKLLEAQGMRISCFLFLRGFMN

SEQ ID NO: 4560 - protein, 127 aa, Homo sapiens
MAAMDTGQRADPSNPGDKEGDLQGLWQELYQLQAKQKKLKREVEKHKLFEDYLIKVLEKIPEGCTGWEEPEEVLVEATVKHYGKLFTASQDTQKRLEAFCQMIQAVHRSLESLEEDHRALMLLSHNK

SEQ ID NO: 4561 - protein, 126 aa, Homo sapiens [sequence omitted]

SEQ ID NO: 4562 - protein, 121 aa, Homo sapiens
MFCSEPLLSVKGMVTLLKLYIWLTPRLTHAQTHSHLERVKPSQNCLRFLECFSSYPPLTPPTPLGPQLKPDTTPFPVRGVHSCPLPCSFLCPQWEAHASLSHRLLALTKGTKADMTEATSK

SEQ ID NO: 4563 - protein, 679 aa, Homo sapiens
MFLLTGGVSLKSAEKNPDPTWLQDKSWEEICRASEFPAFRGLRQHFCEHIYEWREIYDSKEPHNAKFPAPMDKNLNELQKIIILRCLRPDKITPAITNYVTDKLGKKFVEPPPFDLTKSYLDSNCTIPLIFVLSPGADPMASLLKFANDKSMSGNKFQAISLGQGQGPIAAKMIKAAIEEGTWVCLQNCHLAVSWMPMLEKICEDFTSETCNSSFRLWLTSYPSSKFPVTILQNGVKMTNEPPTGLRLNLLQSYLTDPVSDPEFFKGCRGKELLFINEYDTIPFEAISYLTGECNYGGRVTDDWDRRLLLTMLADFYNLYIVENPHYKFSPSGNYFAPPKGTYEDYIEFIKKLPFTQHPEIFGLHENVDISKDLQQTKTLFESLLLTQGGSKQTGASGSTDQILLEITKDILNKLPSDFDIEMALRKYPVRYEESMNTVLVQEMERFNNLIITIRNTLRDLEKAIKGVVVMDSALEALSSSLLVGKVPEIWAKRSYPSLKPLGSYITDFLARLNFLQDWYNSGKPCVFWLSGFFFTQAFLTGAMQNYARKYTTPIDLLGYEFEVIPSDTSDTSPEDGVYIHGLYLDGARWDRESGLLAEQYPKLLFDLMPIIWIKPTQKSRIIKSDAYVCPLYKTSERKGTLSTTGHSTNFVIAMLLKTDQPTRHWIKRGVALLCQLDD

SEQ ID NO: 4564 - protein, 180 aa, Homo sapiens
MGQPWELPCNRHRPPKSILIPPVNTVNGWKWNWSSDIYDNIPILTFQCLRKNPPRLTHKHRRGPCPQEYEKALPLCVPAAFRLPTPGWGATSFPRRPDIRGVYLSQDTQDVGSINGSVHSQCLQPSVQPGAKAAASAIAFARGYRGHFAGRRHLGVRVLQAPRAPTAVPDGPRRRSTAHA

SEQ ID NO: 4565 - protein, 465 aa, Homo sapiens
MFSGFNVFRVGISFVIMCIFYMPTVNSLPELSPQKYFSTLQPGKASLAYFCQADSPRTSVFLEELNEAVRPLQDYGISVAKVNCVKEEISRYCGKEKDLMKAYLFKGNILLREFPTDTLFDVNAIVAHVLFALLFSEVKYITNLEDLQNIENALKGKANIIFSYVRAIGIPEHRAVMEAAFVYGTTYQFVLTTEIALLESIGSEDVEYAYLYFFHCKLVLDLTQQCRRTLMEQPLTTLNIHLFIKTMKAPLLTEVAEDPQQVSTVHLQLGLPLVFIVSQQATYEADRRTAEWVAWRLLGKAGVLLLLRDSLEVNIPQDANVVFKRAEEGVPVEFLVLHDVDLIISHVENNMHIEEIQEDEDNDMEGPDIDVQDDEVAETVFRDRKRKLPLELTVELTEETFNATVMASDSIVLFYAGWQAVSMAFLQSYIDVAVKLKVVWGHLVCSLQHTWLAEKGRQSGHLGNV

SEQ ID NO: 4566 - protein, 158 aa, Homo sapiens
MDLASEITSATQTSSLCSSGRGHAGYPAPGIVAHGFETHGTARVAQGHLLPPCLLPPPQMPVLAALRDLSRRGSTSSSRSPSRPVSTSASKPCLPASCLGETWSISINLVGSSGHLQSPGAQRDAQRETGCLGPFWLPHHQVRDEELSLSHSAQGEEF

SEQ ID NO: 4567 - protein, 294 aa, Homo sapiens
MQRVLKYQLLLQELVKHTTDPTEKANLKLALDAMKDLAQYVNEVKRDNETLREIKQFQLSIENLNQPVLLFGRPQGDGEIRITTLDKHTKQERHIFLFDLAVIVCKRKGDNYEMKEIIDLQQYKIANNPTTDKENKKWSYGFYLIHTQGQNGLEFYCKTKDLKKKWLEQFEMALSNIRPDYADSNFHDFKMHTFTRVTSCKVCQMLLRGTFYQGYLCFKCGARAHKECLGRVDNCGRVNSGEQGTLKLPEKRTNGLRRTPKQVDPDVPCLLHFFISMAPATRSIVKSQKKNKKF

SEQ ID NO: 4568 - protein, 289 aa, Homo sapiens
MPEDLALESNPSDHPRASTIFLSKSQTDVREKRKSNHLNHVSPGQLTKKYSSCSTIFLDDSTVSQPNLRTTVKCVTLAIYYHIKNRDANRSLDIFDERSHPLTREKVPEEYFKHDPEHKFIYRFVRTLFSAAQLTAECAIVTLVYLERLLTYAEIDICPTNWKRIVLGAILLASKVWDDQAVWNVDYCQILKDITVEDMNEMERHFLELLQFNINVPASVYAKYYFDLRSLADDNNLNFLFAPLSKERAQNLEAISRLCEDKDLCRAAMRRSFSADNFIGIQRSKAILS

SEQ ID NO: 4569 - protein, 657 aa, Homo sapiens [sequence omitted]

SEQ ID NO: 4570 - protein, 334 aa, Homo sapiens
MDDPLAAAERCRREAWAKASADPGRRLWRRPAWSTARPGTCCCAAWAGCRAAADTHGHRVPAPGQVPHAGGPRLVQGRPQRLRRDGAQRRAVRPGSRLRSDLLRLLPAGLLQVRPLRGLQDPLRGAPGPRESLRVESRPVPFRLGQRRVLPRCLAGAHGGGQGPRADATGLRQHPASHGVQDVGRGGPVGLLQGRGAAVAEADPLHHDEVRLLRAHGRGPLQVCRAQAPEPVHQGQAAGHHLRGVFCAVVSHPADSVVSVLNKEKGIAALGVLRRLGFTGVWKGVVARIGLFAHIPMIGTLTALQWFIYDLVKVYFKLPRPPVAQAPEPLKKKK

SEQ ID NO: 4571 - protein, 114 aa, Homo sapiens [sequence omitted]

SEQ ID NO: 4572 - protein, 252 aa, Homo sapiens
MYQLEDESAHLDEMPLMMSEEGFENEESDYHTLPRARIMQRKRGLEWFVCDGWKFLCTSCCGWLINICRRKKELKARTVWLGCPEKCEEKHPRNSIKNQKYNVFTFIPGVLYEQFKFFLNLYFLVISCSQFVPALKIGYLYTYWAPLGFVLAVTMTREAIDEFRRFQRDKEVNSQLYSKLTVRGKVQVKSSDIQVGDLIIVEKNQRIPSDMVFLRTSEKAGPFFYQCLCLCSETTNGHSQFRRHIYQVGNVR

SEQ ID NO: 4573 - protein, 824 aa, Homo sapiens [sequence omitted]

SEQ ID NO: 4574 - protein, 232 aa, Homo sapiens
MVQEGGFRSLWRGNGINVLKIAPEYAIKFSVFEQCKNYFCGIQGSPPFQERLLAGSLAVAISQTLINPMEVLKTRLTLRRTGQYKGLLDCTRQILQREGTRALYRGYLPNMLGIIPYACTDLAVYEMLQCFWVKSGRDMGDPSGLVSLSSVTLSTTCGQMASYPLTLVRTRMQAQDTVEGSNPTMRGVLQRILAQQGWLGLYRGMTPTLLKVLPAGGISYVVYEAMKKTLGI

SEQ ID NO: 4575 - protein, 108 aa, Homo sapiens
MGRMNNSRHDALRAVTLTVKVCTFTPEASKTTNPSEGRNSEHVQTSEGTNSGHTILRTVTFTTRIRGFIVEVSETKNPPIPATALQRLYVFFLINISLKKITLLGGML

SEQ ID NO: 4576 - protein, 103 aa, Homo sapiens [sequence omitted]

SEQ ID NO: 4577 - protein, 146 aa, Homo sapiens [sequence omitted]

SEQ ID NO: 4578 - protein, 384 aa, Homo sapiens
MTSTGISASVCHSKPRSQLTSKQMSCIPLVGVERVKRKLAKEKEKAIDCMSHPKEKLAQSQKKVAQLIKEKMNTQANKELIRCVILSRIIFGDHHWKCARALANLAYGYLTLRGLPVQAKKHATSAKNTLLTWKANTTSNKEKEEILEALVKLYYTLAVAWLLQNRGREAYFNLQKAERNMKELKELYKGGVCELQVSENDLTLALGRASLAIHRLNLALAYFEKAIGDVIAAKGDRTSDLISLYEEAAQIEQLRRNHNQAIQYLQQAHSVCVPLFTEVSPKTAEMSALLAKAYAMSGEAQHRDAVEIYFIRSINAYRATLGSEDFETLSTTEEFCKWLVQNGEKQIFQKRRYKHDHKRHEKMFNPISHRGNANENHHTDTRVV

SEQ ID NO: 4579 - protein, 185 aa, Homo sapiens
MHGLCMVPSPHGHPGISGICCAPGQAPDRHPLSLCAPAPGRKRQHHLVAWQPCPAPSCLWPHWTQPPSREAFGCRAGAGRAHPVAGGTQEPWLHLCSRRTCGQLTLQQGPGPKSLTHRVLSPDRAVDSFPFHPGTCWQELPGPHPGAATPAPPATPGHEKVQNSSGPSHNFLELRHSFLSTNGVR

SEQ ID NO: 4580 - protein, 307 aa, Homo sapiens
MKRPEANGPPAMGAAAPAESADLGNFWKAGEPLLQGPDALAAPMSRSPSTPQTTPSPQGRQSPWPLRSLTQSHIEYFQWGRPVPSTHLIEVRPTQDPAKPQRVVSEGWRRPALPGETALGRDLSCAWEGCMKGGLCRAWNPGRTWSPVTIGIAPPERQESPWRSPGQRARPAGRPAAQELLDPCTRETLLGALSQCPKGSARFDGPLWFEVSDSKGGRRNLQPRPSAFKPLSKNGAVASFVPRPGPLKPSLGPWSLSFCDDAWPSVLVQPAPSAIWDFWEATTPSCGSCSRVSFALEVTQSAGPFGS

SEQ ID NO: 4581 - protein, 106 aa, Homo sapiens
MVQGKSQCSLSLSPFFFLRRSLVLLARLECTGTISVHCNLRLPGSSDSPASASCVAGITGARHHAQLIFVFLVETGFHHVGWPGWSRSPDFVIHPPRPPKVLGLQA

SEQ ID NO: 4582 - protein, 320 aa, Homo sapiens
MSFVAYEELIKEGDTAILSLGHGAMVAVRVQRGAQTQTRHGVLRHSVDLIGRPFGSKVTCGRGGWVYVLHPTPELWTLNLPHRTQILYSTDIALITMMLELRPGSVVCESGTGSGSVSHAIIRTIAPTGHLHTVEFHQQRAEKAREEFQEHRVGRWVTVRTQDVCRSGFGVSHVADAVFLDIPSPWEAVGHAWDALKVEGGRFCSFSPCIEQVQRTCQALAARGFSELSTLEVLPQVYNVRTVSLPPPDLGTGTDGPAGSDTSPFRSGTPMKEAVGHTGYLTLARSWGELTQNPCPALPSARRPGQPRNQGGDPALWPPG

SEQ ID NO: 4583 - protein, 145 aa, Homo sapiens
MSIKQMVYGFRSLESHGRTASGVSNPTGVRLQESRIPRAYGFRSLESHGRTASGVSNPTGVRLQESRIPRAYGFRSLESHGRTASGVSNPTGVRLQESRIPRAYGFRSLESHGRTASGVSNPTGVRLQESRIPRVYGFRSLEGLL

SEQ ID NO: 4584 - protein, 124 aa, Homo sapiens
MTLSQAGLPAAQRYLQTPNCAHLLAVFHSPCPARQGPPHPCHTLPLHPGLQVASQCSGSRQQAAGVLLAGCLSPPYGSWAVGGGRKYQMHAWSRIPSFCPWMRVSWTCQGTEAVHCFPCYYCIR

SEQ ID NO: 4585 - protein, 107 aa, Homo sapiens
MHSVHSMEAPPPARCRQHRHLGSWAFQVSIIHGSQSADSLTSRRQAPRCSVSQREAPVPKTGRRPWRTQTTVYTGHGAHRPRHTQTMVYTGHGAQRPRRTQEPRKCS

SEQ ID NO: 4586 - protein, 160 aa, Homo sapiens
MAQFHGMEMPFTKEPHWLFGTMERYLKQIQDLPPTGLPEMNLLEMYSLKDEMGNLRKLLESTPSPVVFCHNDIQEGNILLLSEPENADSLMLVDFEYSSYNYRGFDIGNHFCEWVYDYTHEEWPFYKARPTDYPTQEQQRQRKVRPSPKRSRENWKKICW

SEQ ID NO: 4587 - protein, 566 aa, Homo sapiens
MEQADFTMLPTFIAKVLDTICFIWATSEYYNTPARIIVILQEFCNQIIEMTRTFLSPEEVLKGLQGEIEEVLSGISLAVNVLKELYQTYDFCCVNMKLFFKDKEPVPWEFPSSLAFSRINSFFQRIQTIEELYKTAIEFLKLEKIELGGVRGNLLGSLVTRIYDEVFELVKVFADCKYDPLDPGDSNFDRDYADFEIKIQDLDRRLATIFCQGFDDCSCIKSSAKLLYMCGGLMERPLILAEVAPRYSVMLELFDAELDNAKILYDAQMAASEEGNIPLIHKNMPPVAGQLKWSLELQERLEVSMKHLKHVEHPVMSGAEAKLTYQKYDEMMELLRCHREKIYQQWVAGVDQDCHFNLGQPLILRDAASNLIHVNFSKALVAVLREVKYLNFQQQKEIPDSAESLFSENETFRKFVGNLELIVGWYNEIKTIVNAVEFLLIKSELEAIDVKLLSAETTLFWNGEGVFQYIQEVREILHNLHNRMQKAKQNIEGISQAMKDWSANPLFERKDNKKEALLDLDGRIANLNKRYAAVRDAGVKIQAMVAVRKHPGGFLRTHLLLAGRRE

SEQ ID NO: 4588 - protein, 108 aa, Homo sapiens [sequence omitted]

SEQ ID NO: 4589 - protein, 601 aa, Homo sapiens [sequence omitted]

SEQ ID NO: 4590 - protein, 146 aa, Homo sapiens [sequence omitted]

SEQ ID NO: 4591 - protein, 391 aa, Homo sapiens
MNIFLWTKAALQILLMKYAAGHGLVIRCLPEFRTLGRSTLAPSGQIENVPEKDLHGRLFINRIFHISADRMFELLFTSSRFMQKFASSRNIIDVVSTPWTAELGGDQLRTMTYTIVLNSPLTGKCTAATEKQTLYKESREARFYLVDSEVLTHDVPYHDYFYTVNRYCIIRSSKQKCRLRVSTDLKYRKQPWGLVKSLIEKNSWSSLEDYFKQLESDLLIEESVLNQAIEDPGKLTGLRRRRRTFNRTAETVPKLSSQHSSGDVGLGAKGDITGKKKEMENYNVTLIVVMSIFVLLLVLLNVTLFLKLSKIEHAAQSFYRLRLQEEKSLNLASDMVSRAETIQKNKDQAHRLKGVLRDSIVMLEQLKSSLIMLQKTFDLLNKNKTGMAVES

SEQ ID NO: 4592 - protein, 506 aa, Homo sapiens
MEMETTEPEPDCVVQPPSPPDDFSCQMRLSEKITPLKTCFKKKDQKRLGTGTLRSLRPILNTLLESGSLDGVFRSRNQSTDENSLHEPMMKKAMEINSSCPPAENNMSVLIPDRTNVGDQIPEAHPSTEAPERVVPIQDHSFPSETLSGTVADSTPAHFQTDLLHPVSSDVPTSPDCLDKVIDYVPGIFQENSFTIQYILDTSDKLSTELFQDKSEEASLDLVFELVNQLQYHTHQENGIEICMDFLQGTCIYGRDCLKHHTVLPYHWQIKRTTTQKWQSVFNDSQEHLERFYCNPENDRMRMKYGGQEFWADLNAMNVYETTEFDQLRRLSTPPSSNVNSIYHTVWKFFCRDHFGWREYPESVIRLIEEANSRGLKEVRFMMWNNHYILHNSFFRREIKRRPLFRSCFILLPYLQTLGGVPTQAPPPLEATSSSQIICPDGVTSANFYPETWVYMHPSQDFIQVPVSAEDKSYRIIYNLFHKTVPEFKYRILQILRVQNQFLWEK

SEQ ID NO: 4593 - protein, 167 aa, Homo sapiens
MAWPPDEDEEHGHCSMRPFAVLPASPSRAARGTAVLTSNLLWAPHEPNSARRPRLRLASFPQQRVMIHSCGSEQRLDHFHCCEIHHNGFMHSTVDGHLGRFPFGKMMKKAGMSILSHVFSWAYVLTPVECKPRNESLSHRANVCSSFLDTIRVPKVLARVYAAIHQR

SEQ ID NO: 4594 - protein, 111 aa, Homo sapiens [sequence omitted]

SEQ ID NO: 4595 - protein, 193 aa, Homo sapiens [sequence omitted]

SEQ ID NO: 4596 - protein, 112 aa, Homo sapiens
MNCLWVKSHCPLNRGRSSSERSPKKRVAAEAKAGAGAGAGAGAGAGVVAGVGTAVDGSSSEASLSLTVSWRVTAEKRPDTLKLMSGDRRSGDGSQRPRQAPHSTGRDRFPFP

SEQ ID NO: 4597 - protein, 122 aa, Homo sapiens
MEAARARPLGSGILAKAGQKALWPGDLNGSGSGWATPIRPHEGHRESTLGLRLRGVRCLGHVTLRQGMPSLNLALHLGPHFTSSLRFTREKLRPCLLLGKPRIREAQGCAWRRALCPSNQRM

SEQ ID NO: 4598 - protein, 208 aa, Homo sapiens [sequence omitted]

SEQ ID NO: 4599 - protein, 162 aa, Homo sapiens
MPAAGTMYLTTSTGYPYTYHNGVAYFHTPEVTSVPPPWPSRSVCSSPVMVAQPIYQQPAYHYQATTQYLPGQWQWSVPQPSASSAPFLYLQPSEVIYQPVEIAQDGGCVPPPLSLMETSVPEPYSDHGVQATYHQVYAPSAITMPAPVMQPEPIKTVWSIHY

SEQ ID NO: 4600 - protein, 447 aa, Homo sapiens
MGGGRLGAPMERHGRASATSVSSAGEQAAGDPEGRRQEPLRRRASSASVPAVGASAEGTRRDRLGSYSGPTSVSRQRVESLRKKRPLFPWFGLDIGGTLVKLVYFEPKDITAEEEEEEVESLKSIRKYLTSNVAYGSTGIRDVHLELKDLTLCGRKGNLHFIRFPTHDMPAFIQMGRDKNFSSLHTVFCATGGGAYKFEQDFLTIGDLQLCKLDELDCLIKGILYIDSVGFNGRSQCYYFENPADSEKCQKLPFDLKNPYPLLLVNIGSGVSILAVYSKDNYKRVTGTSLGGGTFFGLCCLLTGCTTFEEALEMASRGDSTKVDKLVRDIYGGDYERFGLPGWAVASSFGNMMSKEKREAVSKEDLARATLITITNNIGSIARMCALNENINQVVFVGNFLRINTIAMRLLAYALDYWSKGQLKALFSEHEGYFGAVGALLELLKIP

SEQ ID NO: 4601 - protein, 404 aa, Homo sapiens
MEHKRVHTGEKPYKCEECGKAFSWSSSLTEHKRIHAGEKPYKCEECGKAFNRSSILTKHKIIHTGEKPYKCEECGKGFSSVSTLNTHKAIHAEEKPYKCEECGKASNSSSKLMEHKRIHTGEKPYKCEECGKAFSWSSSLTEHKRIHAGEKPYKCEECGKAFNRSSILTKHKIIHTGEKPYKCEGCGKAFSKVSTLNTHKAIHAEEKPYKCEECGKASNSSSKLMEHKRIHTGEKPYKCEECGKAFSWSSSLTEHKRIHAGEKPYKCEECGKAFTWSSSFTKHKRIHAAEKPYKCEECGKGFSTFSILTKHKIIHTGEKRYKCEECGKAFSWSSILTEHKIIHTGEKPYKCEECGKAFSRSSSLTRHKRIHTGEKPYKCEECGKAFKSSSTVSYHKKIHTGENP

SEQ ID NO: 4602 - protein, 100 aa, Homo sapiens
MRECSGVGVFWPKCLRIRKRKPSSGCTLLVSTLSHKGEPSSGALSRAFKCTKANDTVPWVALCRSVSLMGFVGTVNAYKRLSLFLHHHHSPPRRFLYLFL

SEQ ID NO: 4603 - protein, 491 aa, Homo sapiens
MQPLLCLGNLEDARERTGTLLAQHPAWGRTRAKPGSPLNTKKEGDLIAAQARLKDLEALLNSKEAALSTALSEKRTLEGELHDLRGQVAKLEAALGEAKKQLQDEMLRRVDAENRLQTMKEELDFQKNIYSEELRETKRRHETRLVEIDNGKQREFESRLADALQELRAQHEDQVEQYKKELEKTYSAKLDNARQSAERNSNLVGAAHEELQQSRIRIDSLSAQLSQLQKQLAAKEAKLRDLEDSLARERDTSRRLLAEKEREMAEMRARMQQQLDEYQELLDIKLALDMEIHAYRKLLEGEEERLRLSPSPTSQRSRGRASSHSSQTQGGGSVTKKRKLESTESRSSFSQHACTSGRVAVEEVDEEGKFVRLRNKSNEDQSMGNWQIKRQNGDDPLLTYRFPPKFTLKAGQVVTIWAAGAGATHSPPTDLVWKAQNTWGCGNSLRTALINSTGEEVAMRKLVRSVTVVEDDEDEDGDDLLHHHHVSGSRR

SEQ ID NO: 4604 - protein, 155 aa, Homo sapiens
MHVESSAEPGKAPKHAGQKKTYRAIAETYAFLPREAVTRFLMSCTECQKRMHFNSNGLEPKENEPPSPLVSGIIDYNMPLTSTYLKQMKLRVMNSQEQDETSVSSEDFDMSDSTWMSADPHLASSLSPSQDERMRSPQNLHDQEDGGVCLQGPTA

SEQ ID NO: 4605 - protein, 131 aa, Homo sapiens
MRTFQHIGFASKTVNFIIVVELLGQNSNEIEQVEVETDFDASSRLLSKEEWRQHSVPALSENTARFQVTGLFCFRSDKFSTCLETLITYFFLPQKSSSLFPALQPRKHSNYFKTPGDPLVLCKHGDQVTFQ

SEQ ID NO: 4606 - protein, 327 aa, Homo sapiens
MSAIATNGVVPAGGSYFMISRSLGPEFGGAVGLCFYLGTTFAAAMYILGAIEILLTYIAPPAAIFYPSGAHDTSNATLNNMRVYGTIFLTFMTLVVFVGVKYVNKFASLFLACVIISILSIYAGGIKSIFDPPVFPVCMLGNRTLSRDQFDICAKTAVVDNETVATQLWSFFCHSPNLTTDSCDPYFMLNNVTEIPGIPGAAAGVLQENLWSAYLEKGDIVEKHGLPSADAPSLKESLPLYVVADIATSFTVLVGIFFPSVTGMAMVSAGTWWWAHWPGLHPGSSSSAPSFQRVALASRASQGHHAYCRPLPRTTSSPSSGCLATGR

SEQ ID NO: 4607 - protein, 657 aa, Homo sapiens
MGPNAVPVLNSEFAHREARGQLKVAKESDSVFVLKIYHLRQEDSGKYNCRVTEREKTVTGEFIDKESKRPKNIPIIVLPLKSSISVEVASNASVILEGEDLRFSCSVRTAGRPQGRFSVIWQLVDRQNRRSNIMWLDRDGTVQPGSSYWERSSFGGVQMEQVQPNSFSLGIFNSRKEDEGQYECHVTEWVRAVDGEWQIVGERRASTPISITALEMGFAVTAISRTPGVTYSDSFDLQCIIKPHYPAWVPVSVTWRFQPVGTVEFHDLVTFTRDGGVQWGDRSSSFRTRTAIEKAESSNNVRLSISRASDTEAGKYQCVAELWRKNYNNTWTRLAERTSNLLEIRVLQPVTKLQVSKSKRTLTLVENKPIQLNCSVKSQTSQNSHFAVLWYVHKPSDADGKLILKTTHNSAFEYGTYAEEEGLRARLQFERHVSGGLFSLTVQRAEVSDSGSYYCHVEEWLLSPNYAWYKLAEEVSGRTEVTVKQPDSRLRLSQAQGNLSVLETRQVQLECVVLNRTSITSQLMVEWFVWKPNHPERETVARLSRDATFHYGEQAAKNNLKGRLHLESPSPGVYRLFIQNVAVQDSGTYSCHVEEWLPSPSGMWYKRAEDTAGQTALTVMRPGEGPRPQASTPSGVSHLSILFYALDKISLLINYLQ

SEQ ID NO: 4608 - protein, 272 aa, Homo sapiens
MAEALRRIQVVHAFDIFQMLDVLQELRGTVAQQVTGSSGTVKVVVVDSVTAVVSPLLGGQQREGLALMMQLARELKTLARDLGMAVVVTNHITRDRDSGRLKPALGRSWSFVPSTRILLDTIEGAGASGGRRMACLAKSSRQSIDSEDSFVPGRRASLSDLTDLEDIEGLTVRQLKEILARNFVNYKGCCEKWELMERVTRLYKDQKGLQHLGGAVPSGLEENLCKICMDSPIDCVLLECGHMVTCTKCGKRMNECPICRQYVIRAVHVFRS

SEQ ID NO: 4609 - protein, 112 aa, Homo sapiens
MIFADRAPSNTSTLMKFYSLLLYSLLLSFPFLCHSLPLPNCLQHTVNFTHSLLTASNPSLAKNCWLCVSLSSCSYTATPLYRPIGLPLPSPCTSEPPSIALIFTHLGNFFTF

SEQ ID NO: 4610 - protein, 173 aa, Homo sapiens
MFCLLHLCFYLANFASSIKRTHAVNGCCGLQMIALWAQSSGNADARVEEILAGEERRLAALLGSQGMRFWVCLAACRAMWGLAARRGRAEDSSSSPVDASKFPWRGGQHRTTMMPCLLRVGVFRPCHVRPTGDPSCDVQPPRLGFSRVPDTQVAFYGSGHWDPTPFFCTQLFF

SEQ ID NO: 4611 - protein, 110 aa, Homo sapiens [sequence omitted]

SEQ ID NO: 4612 - protein, 364 aa, Homo sapiens
MLAWKVLPGHRSTLSSIEDMQWGKGVREIPASVCTLPCKPGQRKKTQKGTPCCWTCEPCDGYQYQFDEMTCQHCPYDQRPNENRTGCQDIPIIKLEWHSPWAVIPVFLAMLGIIATIFVMATFIRYNDTPIVRASGRELSYVLLTGILLCYIITFLMIAKPDVAVCSFRRVFLGLGMCISYAALLTKTNRIYRIFEQGKKSVTAPRLISPTSQLAITSSLISVQLLGVFIWFGVDPPNIIIDYDEHKTMNPEQARGVLKCDITDLQIICSLGYSILLMVTCTVYAIKTRGVPENFNEAKPIGFTMYTTCIVWLAFIPIFFGTAQSAEKHQFAKDNSLQLHLCSCKRHDSCFFMAVQYSMVSGFP

SEQ ID NO: 4613 - protein, 100 aa, Homo sapiens
MLAAKPMTTNMIKSITRMESPQNRKCVYFFTSDPPALSYAWNKVQVGQSPDTAEPAWHTTGPVCEVSRQELRGEVWREKGLGTLHWEASGSRTGHSCKAE

SEQ ID NO: 4614 - protein, 684 aa, Homo sapiens
MKLKRARLADDLNEKIALRPGPLELVEKNILPVDSAVKEAIKGNQVSFSKSTDAFAFEEDSSSDGLSPDQTRSEDPQNSAGSPPDAKASDTPSTGSLGTNQDLASGSENDRNDSASQPSHQSDAGKQGLGPPSTPIAVHAAVKSKSLGDSKNRHKKPKDPKPKVKKLKYHQYIPPDQKAEKSPPPMDSAYARLLQQQQLFLQLQILSQQQQQQQHRFSYLGMHQAQLKEPNEQMVRNPNSSSTPLSNTPLSPVKNSFSGQTGVSSFKPGPLPPNLDDLKVSELRQQLRIRGLPVSGTKTALMDRLRPFQDCSGNPVPNFGDITTVTFPVTPNTLPNYQSSSSTSALSNGFYHFGSTSSSPPISPASSDLSVAGSLPDTFNDASPSFGLHPSPVHVCTEESLMSSLNGGSVPSELDGLDSEKDKMLVEKQKVINELTWKLQQEQRQVEELRMQLQKQKRNNCSEKKPLPFLAASIKQEEAVSSCPFASQVPVKRQSSSSECHPPACEAAQLQPLGNAHCVESSDQTNVLSSTFLSPQCSPQHSPLGAVKSPQHISLPPSPNNPHFLPSSSGAQGEGHRVSSPISSQVCTAQNSGAHDGHPPSFSPHSSSLHPPFSGAQADSSHGAGGNPCPKSPCVQQKMAGLHSSDKVGPKFSIPSPTFSKSSSAISEVTQPPSYEDAVKQVTM

SEQ ID NO: 4615 - protein, 259 aa, Homo sapiens
MDHCLISGLSQLDLPSALTKNWPSKPESCPLALLPGQHELHHLLHPLHQLPVPGHCPGTQLCAQLVSSVASVYAGIRGSGSRISMSCFTSFQGSMGSRGLPAVMAGGLAGMGVIQNEKETMQSLNDHLASYLDRVRSLDTKNWKLESQEHLEKKGPQVRDWSHDFKTIENLRAQIFANTVDSAHIVLQIDNACLAGDDFRVKYETELAMCQSVESDIHGLHKVIDDTNVTWLQLEAEIKALKEKLLFMKKNHEEEVKGL

SEQ ID NO: 4616 - protein, 413 aa, Homo sapiens
MSARGPAIGIDLGTTYSCVGVFQHGKVEIIANDQGNRTTPSYVAFTDTERLIGDAAKNQVAMNPTNTIFDAKRLIGRKFEELNADLFRGTLEPVEKALRDAKLDKGQIQEIVLVGGSTRIPKIQKLLQDFFNGKELNKSINPDEAVAYGAAVQAAILIGDKSENVQDLLLLDVTPLSLGIETAGGVMTPLIKRNTTIPTKQTQTFTTYSDNQSSVLVQVYEGERAMTKDNNLLGKFDLTGIPPAPRGVPQIEVTFDIDANGILNVTAADKSTGKENKITITNDKGRLSKDDIDRMVQEAERYKSEDEANRDRVAAKNALESYTYNIKQTVEDEKLRGKISEQDKNKILDKCQEVINWLDRNQMAEKDEYEHKQKELERVCNPIISKLYQGGPGGGSGGGGSGASGGPTIEEVD

SEQ ID NO: 4617 - protein, 395 aa, Homo sapiens [sequence omitted]

SEQ ID NO: 4618 - protein, 114 aa, Homo sapiens
MAASGKLLPIPLPPTTRNKYPAPRSTPAATQSSSLRMRLFQGHRKEENLGQMVREGNLRVQDTSAHPHSAWHRSCGISPQRTVSTLERLKLRGCANSPTFAGPLAGDLVLALPQ

SEQ ID NO: 4619 - protein, 134 aa, Homo sapiens [sequence omitted]

SEQ ID NO: 4620 - protein, 486 aa, Homo sapiens
MKNWGVIGGIAAALAAGIYVIWGPITERKKRRKGLVPGLVNLGNTCFMNSLLQGLSACPAFIRWLEEFTSQYSRDQKEPPSHQYLSLTLLHLLKALSCQEVTDDEVLDASCLLDVLRMYRWQISSFEEQDAHELFHVITSSLEDERDRQPRVTHLFDVHSLEQQSEITPKQITCRTRGSPHPTSNHWKSQHPFHGRLTSNMVCKHCEHQSPVRFDTFDSLSLSIPAATWGHPLTLDHCLHHFISSESVRDVVCDNCTKIEAKGTLNGEKVEHQRTTFVKQLKLGKLPQCLCIHLQRLSWSSHGTPLKRHEHVQFNEFLMMDIYKYHLLGHKPSQHNPKLNKNPGPTLELQDGPGAPTPVLNQPGAPKTQIFMNGACSPSLLPTLSAPMPFPLPVVPDYSSSTYLFRLMAVVVHHGDMHSGHFVTYRRSPPSARNPLSTSNQWLWVSDDTVRKASLQEVLSSSAYLLFYERVLSRMQHQSQECKSEE

SEQ ID NO: 4621 - protein, 313 aa, Homo sapiens
MAPRWCRLTLTRRRGGWTVPSSRRRTSGSCRLMTWLPTAAAGTSEFLCLMTPTTNGNGWSSSLKWPTSTSTRWCWWSPRRRGGWFLTKKSSETLRKAGQVFLEELGNHKAFKKELRQFVPGDEPREKMDLVTYFGKRPPGVLHCTTKFCDYGKAPGAEEYAQQDVLKKSYSKAFTLTISALFVTPKTTGARVELSEQQLQLWPSDVDKLSPTDNLPRGSRAHITLGCAADVEAVQTGLDLLEILRQEKGGSRGEEVGELSRGKLYSLGNGRWMLTLAKNMEVRAIFTGYYGKGKPVPTQGSRKGGALQSCTII

SEQ ID NO: 4622 - protein, 163 aa, Homo sapiens [sequence omitted]

SEQ ID NO: 4623 - protein, 286 aa, Homo sapiens
MPILKQLVSSSVHSKRRSRADLTAEMISAPLGDFRHTMHVGRAGDAFGDTSFLNSKAAEKGTSKLPKSLSSSPVKKANDGEGGDEEAGTEEAVPRRNGAAGPHSPDPLLDEQAFGDLTDLPVVPKATYGLKHAESIMSFHIDLGPSMLGDVLSIMDKEEWDPEEGEGGYHGDEGAAGTITQAPPYAVAAPPLARQEGKAGPDLPSLPSHALEDEGWAAAAPSPGSARSMGSHTTRDSSSLSSCTSGILEERSPAFRGPDRARAAVSRQPDKEFSFMDEEEEDEIRV

SEQ ID NO: 4624 - protein, 392 aa, Homo sapiens
MNLSAQDHQTFFTCDTDFLRPSDTVMQKAWRERNPPARIKAAYQALELNNDCATAYVLLAEEEATTIVDAERLFKQALKAGETIYRQSQQCQHQSPQHEAQLRRDTNVLVYIKRRLAMCARKLGRIREAVKIMRDLMKEFPPLTMLNIHENLLESLLELQAYPDVQAVLAKYDDISLPKSAAICYTAALLKTRTVSEKFSPETASRRGLSTAEINAVEAIHRAVEFNPHVPKYLLEMKSLILPPEHILKRGDSEAIAYAFFHLQHWKRIEGALNLLQCTWEGTFRMIPYPLEKGHLFYPYPSCTETADRELLPTFHHVSVYPKKELPLFIHFTAGFCSSTAMIAILTHQFPEIMGIFAKAVLGLWCPQPWASSGFEENTQDLKSEDLGLSSG

SEQ ID NO: 4625 - protein, 323 aa, Homo sapiens
MNQKKCQEHLMTGGENGRSWPKVQSWLKMMLISYSLSALSFSQMSELLTRAEERVLVRPHEPPPPPPMHGAGDAKPIPTCISSATGLIENRPQSPATGRTPVFVSPTPPPPPPPLPSALSTSSLRASMTSTPPPPVPPPPPPPATALQAPAVPPPPAPLQIAPGVLHPAPPPIAPPLVQPSPPVARAAPVCETVPVHPLPQGEVQGLPPPPPPPPLPPPGIRPSSPVTVTALAHPPSPPSQVIPASEPKRHPSTLPVISDARSVLLEAIRKGIQLRKVEEQREQEAKHERIENDVATILSRRIAVEYSDSEDDSEFDEVDWLE

SEQ ID NO: 4626 - protein, 452 aa, Homo sapiens
MTAVSSNRNPEDDGCLLEQEPRGRRLSPRTGTPRTTAVSSNRDPKNDGCLLKQEPRGRRLSPRTGAPGTTAVSSNRNPEDDGCLLKQEPRGRRLSPQTGTPRTTAVSSNRNPGDDGCLLKQGPRGRRLSPQTGTPGTTAVSSNRNPEDDGCLLKQEPRGRRLSPQTGTPGTTAVSSNRDHEDDGCLLKQESRGRRLSPQTGTPGTTAVSSNRNPEDDGCLLKQESRGRRLSPQTGTPGTTAVSSNRDPEDDGCLLKQGPRGRRLSPQTGTPRTTAVSSNRNPEDDGCLLKQGPRGRRLSPQTGIPRTTAVSSNRDPGEDGCLLKQESRGRRLSPQTGTTRTTAVSSKRNPEDDGCLLKQEPRGRRLSSLTGAPGTTAVSSNRDPRTTAVSSNRNPGDDGCLLKQGPRGRRLSPQTGTPGTTAVSSNRDPEDDGCLLKQEPQELRKPEADTAL

SEQ ID NO: 4627 - protein, 102 aa, Homo sapiens
MDSSACKKSHQSKKWRIQAQENFAKKFPYRLSWLTEPDPEPLQPWEVTNDSNTVQLPLQKRLVPTRSIPVRGVGVRIKKSMNVTSRTLSQMYTHTGKWAPFH

SEQ ID NO: 4628 - protein, 455 aa, Homo sapiens
MFCSGRKWVAEATICTKLMKREKRRMGKRRAKKAKREEKKKGGERRRNEKRGNRMKRMCERKKYETDLEDQDIMGAFLDKPKMEKHNAQGQGNGLRYGLSSMQGWRVEMEDAHTAVIGLPSGLESWSFFAVYDGHAGSQVAKYCCEHLLDHITNNQDFKGSAGAPSVENVKNGIRTGFLEIDEHMRVMSEKKHGADRSGSTAVGVLISPQHTYFINCGDSRGLLCRNRKVHFFTQDHKPSNPLEKERIQNAGGSVMIQRVNGSLAVSRALGDFDYKCVHGKGPTEQLVSPEPEVHDIERSEEDDQFIILACDGIWDVMGNEELCDFVRSRLEVTDDLEKVCNEVVDTCLYKGSRDNMSVILICFPNAPKVSPEAVKKEAELDKYLECRVEEIIKKQGEGVPDLVHVMRTLASENTPSLPPGGELASKRNVIEAVYNRLNPYKNDDTDSTSTDDMW

SEQ ID NO: 4629 - protein, 112 aa, Homo sapiens [sequence omitted]

SEQ ID NO: 4630 - protein, 125 aa, Homo sapiens [sequence omitted]

SEQ ID NO: 4631 - protein, 119 aa, Homo sapiens [sequence omitted]

SEQ ID NO: 4632 - protein, 155 aa, Homo sapiens
MCCGCYLFFEHEVALCLTHGLPMFGKAYGKQTCFPICEEGLSFHMADPCAWGTQNRAPWGLVEGPYANSDIWENSGWGSFFQQIYIEHLLCAGTFCLQKALPGDCLNSGWGVMGALDIISRLRPQYVDIVMSSWPLPDTHASCHILTEMMDLRIN

SEQ ID NO: 4633 - protein, 193 aa, Homo sapiens
MQENPEAWAQGIVREIRQTRDSQPLEYSRTSPTEWKSSSQRRGIYPASTQLDRNSLSEQQQQQREDEDDYEAAYWASMRSFYEKNPSCSRPWPPKPKNAITIALSSCALFNMVDGRKIYEQEGLEKYMEYQLTNENVILTPGPAFRFVKVFCKLSLARQDTRWRGRDPGQPLGGHPISQIIPSPPLSFLSPSS

SEQ ID NO: 4634 - protein, 157 aa, Homo sapiens [sequence omitted]

SEQ ID NO: 4635 - protein, 129 aa, Homo sapiens
MQPCTPGLKPSSHLSLQSSWEHKCAPSHPANVYFFVERVSLTMLPRLVLKLLASTDPPPLASQSAGTIGMSCHCQLIVLFLHLLRQGLACGRADLELLALSSTSLLGLLQCWDDRGEPLCPARGFFLKW

SEQ ID NO: 4636 - protein, 108 aa, Homo sapiens [sequence omitted]

SEQ ID NO: 4637 - protein, 124 aa, Homo sapiens
MCTFMVFIIIYELTSKRARGGVFQKSVWAAPNHPPCIREKPDSWKALFPGHSPVLKHVTISHASLLGPCCLLDQECPPPRSHPHSPLHCKIWAQQIAQLLFSECFFNVSEKEFLPPLLSISSTT

SEQ ID NO: 4638 - protein, 180 aa, Homo sapiens [sequence omitted]

SEQ ID NO: 4639 - protein, 283 aa, Homo sapiens
MGFRLLCCVAFCLLGAGPVDSGVTQTPKHLITATGQRVTLRCSPRSGDLSVYWYQQSLDQGLQFLIQYYNGEERAKGNILERFSAQQFPDLHSELNLSSLELGDSALYFCASSVGGPSMDQLNPSGANVLTFGAGSRLTVLEDLKNVFPPEVAVFEPSEAEISHTQKATLVCLATGFYPDHVELSWWVNGKEVHSGVSTDPQPLKEQPALNDSRYCLSSRLRVSATFWQNPRNHFRCQVQFYGLSENDEWTQDRAKPVTQIVSAEAWGRAGEWGLGRCLEEIR

SEQ ID NO: 4640 - protein, 474 aa, Homo sapiens [sequence omitted]

SEQ ID NO: 4641 - protein, 170 aa, Homo sapiens
MALLLSDWCPDGDADTHTGTDPGRTTHRLCARERGVRGTQPCPRIYLRLPAQNCEETRFCCASPGSVVLGHGAPRTASPPSALSHPSPLEGLSFSPFPPSVLSHPSPPEGLSFSLFHCLCSGKLSESPGCFWNSLGWSFSVLTEPGVWKVGEAIWVAENLAQPLTSPCAC

SEQ ID NO: 4642 - protein, 193 aa, Homo sapiens [sequence omitted]

SEQ ID NO: 4643 - protein, 103 aa, Homo sapiens [sequence omitted]

SEQ ID NO: 4644 - protein, 140 aa, Homo sapiens
MLTIMCGFQMQSHLAAGDMKRLGYDFDHLLSPALPISTSVAREGPSLITLRATRDAECALSSGAGQGAGRGEKTPASPTNQHPGLEELQQAADREFHPQPDSMNSEVQDRASCRWEPGMVGAASSAAGESVCVQGCRVAC

SEQ ID NO: 4645 - protein, 100 aa, Homo sapiens
MMGAVAEKKGPGEVAGTVTGQKRRAEQDSTTVAAFASSLVSGLNSSASEPAKEPAKKSRKHAASDVDLEIESLLNQQSTKEQQSKKGHGVGERMSKSLGV

SEQ ID NO: 4646 - protein, 179 aa, Homo sapiens [sequence omitted]

SEQ ID NO: 4647 - protein, 237 aa, Homo sapiens [sequence omitted]

SEQ ID NO: 4648 - protein, 120 aa, Homo sapiens [sequence omitted]

SEQ ID NO: 4649 - protein, 716 aa, Homo sapiens [sequence omitted]

SEQ ID NO: 4650 - protein, 119 aa, Homo sapiens
MFPAFENAWLGLGTVAHACSPSTLRGRGGRITRSGDRDHPGRHGGGLSLLKVQRLAGHDGGRLWSRLLGRLRRENRLNLGDGGCSEPRFCHCTIAWRESETPSQKKKKKRKKEKKKMLG

SEQ ID NO: 4651 - protein, 134 aa, Homo sapiens
MESGCVSRLEGSGAIWAHCNLHLPGSSDSPASASQVAGTTGVCHHAQLMFLFLVETGFHHVGQAGLELLTSSDPPTSASQSSGIRGVSHCARPVFNFYKDQVFALLPRLECSGMTIAYCSLELLRSSNLLASTS

SEQ ID NO: 4652 - protein, 131 aa, Homo sapiens
MSGGHSSPEPPRPWPLDRGSLPSPPAFPPGIATRATRAWAAPAKMLPCARSACRARDSGLASGTRAEVGGGPASEEYARRLAGCCPRLARPSLPTCEMHRTGLHLFNESFLSSCCEPGLEQAWVLWMGAGP

SEQ ID NO: 4653 - protein, 208 aa, Homo sapiens [sequence omitted]

SEQ ID NO: 4654 - protein, 100 aa, Homo sapiens [sequence omitted]

SEQ ID NO: 4655 - protein, 193 aa, Homo sapiens [sequence omitted]

SEQ ID NO: 4656 - protein, 643 aa, Homo sapiens
MALSLEEFVHSLDLRTLPRVLEIQAGIYLEGSIYEMFGNECCFSTGEVIKITGLKVKKIIAEICEQIEGCESLQPFELPMNFPGLFKIVADKTPYLTMEEITRTIHIGPSRLGHPCFYHQKDIKLENLIIKQGEQIMLNSVEEIDGEIMVSCAVARNHQTHSFNLPLSQEGEFYECEDERIYTLKEIVEWKIPKNRTRTVNLTDFSNKWDSTNPFPKDFYGTLILKPVYEIQGVMKFRKDIIRILPSLDVEVKDITDSYDANWFLQLLSTEDLFEMTSKEFPIVTEVIEAPEGNHLPQSILQPGKTIVIHKKYQASRILASEIRSNFPKRHFLIPTSYKGKFKRRPREFPTAYDLEIAKSEKEPLHVVATKAFHSPHDKLSSVSVGDQFLVHQSETTEVLCEGIKKVVNVLACEKILKKSYEAALLPLYMEGGFVEVIHDKKQYPISELCKQFRLPFNVKVSVRDLSIEEDVLAATPGLQLEEDITDSYLLISDFANPTECWEIPVGRLNMTVQLVSNFSRDAEPFLVRTLVEEITEEQYYMMRRYESSASHPPPRPPKHPSVEETKLTLLTLAEERTVDLPKSPKRHHVDITKKLHPNQAGLDSKVLIGSQNDLVDEEKERSNRGATAVAETFKKKKKKKKT

SEQ ID NO: 4657 - protein, 213 aa, Homo sapiens
MSPKCAETAQQLRCLTENVQRPLCPTMPAWGRPSLGLLRVSPACQPKGGRSCGCSQPLLKVGLWVEMWAASGRHSYKCIPALRTTFLLPSPFLRTPMQKRGRQLTKDREGYCSWHLMGSICCIPLGCCPGWIGKELAGRLSSVLTTWLGGGRGAWQEQSAGPGNWGLVHVCTHVCVCVRACWVGREEAVKPHPLLSAAVLLCVSAARGCHHTS

SEQ ID NO: 4658 - protein, 398 aa, Homo sapiens
MGIVIDWAPKGHYWQDCSSKNTLCSEFIYSLDYIEHGWQSYTMRQRVSPYPFKWMDTGIAPPRPKIIHPFFTPEHPELWKLAAALSGIKIWNTTYQLLRTKTKTPTFNITLISEWVIPIRSCVKPPYMLLVGNIIMMPDAQTIECHNCKLFTCIDATFNPTTSILLVRAREGVWIPVSLHRPWESSPSIHIVNEVLKDILKRTKRFIFTLIAVLAGLLAVTATAATAGVAIRSSVQTAHYVEACQKNSSRLWNSQAQIDQKLANQINDLRQSVTWLGDRVMNLQHRMQLQCDWNTSDYCITPYAYNQDQHSWENVSRHLKAWDDNLTLDISQLKEQIFEASQAHLSTVPGSHIFEGITKQLPDFNPFKWLKPVRGSLLLLALLILVCLCCLLLVCRCL

SEQ ID NO: 4659 - protein, 119 aa, Homo sapiens
MCPTKGRRGCGCKVQRHPGWKVSPGSQTPTHPRPHQASCPGLKQDHICAPSPFSTPAKRKLLQATRLRNLAVSQALGAVHKSCQETAPWVPLFTLLSSVGGSFGPAQLDPWHCPAASPR

SEQ ID NO: 4660 - protein, 181 aa, Homo sapiens
MYTIINGPSKLVAQRRTGLTQQQVKGQLQELLKSRQPAPPTLQPQRAQPFAQPLGPWPLSSAGPRLVFNRVNRRRDPSKSPSLQGTQETYTLAHKENVRFVSEAWQQRLRCQYVLQAALLLGPSYSPASAFQEAETTRTQDCTWLANTIANKKILHGSLRSVPNTTRQFDIIIEHCRNNAE

SEQ ID NO: 4661 - protein, 287 aa, Homo sapiens [sequence omitted]

SEQ ID NO: 4662 - protein, 134 aa, Homo sapiens
MMKCPQALLAIFWLLLSWVSSEDKVVQSPLSLVVHEGDTVTLNCSYEVTNFRSLLWYKQEKKAPTFLFMLTSSGIEKKSGRLSSILDKKELFSILNITATQTGDSAVYLCAVEAQCSLVTCSLYSNSTAEALQL

SEQ ID NO: 4663 - protein, 181 aa, Homo sapiens
MFYAHFVLSKRGPLAKIWLAAHWDKKLTKAHVFECNLESSVESIISPKVKMALRTSGHLLLGVVRIYHRKAKYLLADCNEAFIKIKMAFRPGVVDLPEENQEERRWNKRTQQMLHGLQRALAKTGAESISLLELCRNTNRKQAAAKFYSFLVLKKQQAIELTQEEPYSDIIATPGPRFHII

SEQ ID NO: 4664 - protein, 444 aa, Homo sapiens
MLQRIGLIFLHNIVVVSNCFYFQAFLDEFTNWSRINPNKARIPMAGDTQGVVGTVSKPCFTAYEMKIGAITFQVATGDIATEQVDVIVNSTARTFNRKSGVSRAILEGAGQAVESECAVLAAQPHRDFIITPGGCLKCKIIIHVPGGKDVRKTVTSVLEECEQRKYTSVSLPAIGTGNAGKNPITVADNIIDAIVDFSSQHSTPSLKTVKVVIFQPELLNIFYDSMKKRDLSASLNFQSTFSMTTCNLPEHWTDMNHQLFCMVQLEPGQSEYNTIKDKFTRTCSSYAIEKIERIQNAFLWQSYQVKKRQMDIKNDHKNNERLLFHGTDADSVPYVNQHGFNRSCAGKNAVSYGKGTYFAVDASYSAKDTYSKPDSNGRKHMYVVRVLTGVFTKGRAGLVTPPPKNPHNPTDLFDSVTNNTRSPKLFVVFFDNQAYPEYLITFTA

SEQ ID NO: 4665 - protein, 129 aa, Homo sapiens [sequence omitted]

SEQ ID NO: 4666 - protein, 252 aa, Homo sapiens [sequence omitted]

SEQ ID NO: 4667 - protein, 126 aa, Homo sapiens
MCRKLKLDPFLTPYTKINSRWIKDFNVRPKTIKTLEENVGNTIQDIGISKDIIIKMSKANATNAKIDKWDPIKLKSFCTAKETIIRVNRQPTEWEKIFAISPSDKSLISRIYKELKFTRKEKLIKK

SEQ ID NO: 4668 - protein, 101 aa, Homo sapiens [sequence omitted]

SEQ ID NO: 4669 - protein, 110 aa, Homo sapiens
MTGWPPNWASCIPACARSSLLHLPAGGGLQTKSDHGTPLGPCILWPAGRASATWPWPPLASRPPIPSRPHCALVSLPSFLLPNFTHQFPSPFLCRVFLLLEFFAPGSPCG

SEQ ID NO: 4670 - protein, 115 aa, Homo sapiens
MDNRKEPPFFNDDNMGPFYYRLHFCDTMELFIETLTGTCFELRVSPFETVISVKAKIRRLEGIPICRQHLIWNNMELENDYCLNDYNISEGCTLKLVLAMRGGPINTRRDLQIPR

SEQ ID NO: 4671 - protein, 135 aa, Homo sapiens
MAAATETGQAAVPSRKRRRGRRPPASDPQTLARLAAGPWLPGTLTCPERTGGDAATRSARPPVLPPPPRPPQRRCRHLVSRAGTPRCACAGTASEGPRRGRAAILSVAGSAGSSHPACFRPPPLLPIRPCCSLWR

SEQ ID NO: 4672 - protein, 265 aa, Homo sapiens
MLALTVLETCVKNCGHRFHVLVASQDFVESVLVRTILPKNNPPTIVHDKVLNLIQSWADAFRSSPDLTGVVTIYEDLRRKGLEFPMTDLDMLSPIHTPQRTVFNSETQSGQDSVGTDSSQQEDSGQHAAPLPAPPILSGDTPIAPTPEQIGKLRSELEMVSGNVRVMSEMLTELVPTQAEPADLELLQELNRTCRAMQQRVLELIPQIANEQLTEELLIVNDNLNNVFLRHERDRGLTVLPRLVSNSWPQAVLPPWPPKALVLQA

SEQ ID NO: 4673 - protein, 427 aa, Homo sapiens
MFEIKKICCIGAGYVGGPTCSVIAHMCPEIRVTVVDVNESRINAWNSPTLPIYEPGLKEVVESCRGKNLFFSTNIDDAIKEADLVFISVLSNPEFLAEGTAIKDLKNPDRVLIGGDETPEGQRAVQALCAVYEHWVPREKILTTNTWSSELSKLAANAFLAQRISSINSISALCEATGADVEEVATAIGMDQRIGNKFLKASVGFGGSCFQKDVLNLVYLCEALNLPEVARYWQQVIDMNDYQRRRFASRIIDSLFNTVTDKKIAILGFAFKKDTGDTRESSSIYISKYLMDEGAHLHIYDPKVPREQIVVDLSHPGVSEDDQVSRLVTISKDPYEACDGAHAVVICTEWDMFKELDYERIHKKMLKPAFIFDGRRVLDGLHNELQTIGFQIETIGKKVSSKRIPYAPSGEIPKFSLQDPPNKKPKV

SEQ ID NO: 4674 - protein, 115 aa, Homo sapiens [sequence omitted]

SEQ ID NO: 4675 - protein, 111 aa, Homo sapiens
MPDPDFTVRDVKLLVGSRRLVDVMDVNTQKGTEMSMSQFVRYYETPEAQRDKLYNVISLEFSHTKLEHLVKRPTVVDLVDWVDNMWPQHLKEKQTEATNAIAEMKYPKVKK

SEQ ID NO: 4676 - protein, 178 aa, Homo sapiens [sequence omitted]

SEQ ID NO: 4677 - protein, 318 aa, Homo sapiens
MQTSEREGSGPELSPSVMPEAPLESPPFPTKSPAFDLFNLVLSYKRLEIYLEPLKDAGDGVRYLLSLIQLEAFLSRLCCTCEAAYRVLHWENPVVSSQFYGALLGTVCMLYLLPLCWVLTLLNSTLFLGNVEFFRVVSEYRASLQQRMNPKQEEHAFESPPPPDVGGKDGLMDSTPALTPTEDLTPGSVEEAEEAEPDEEFKDAIEEDDEGAPCPAEDELALQDNGFLSKNEVLRSKVSRLTERLRKRYPTNNFGNCTGCSATFSVLKKRRSCSNCGNSFCSRCCSFKVPKSSMGATAPEAQRETVFVCASCNQTLSK

SEQ ID NO: 4678 - protein, 209 aa, Homo sapiens
MCLPASHAVSVIHPSSRKTRGVPLSEAGNVKSPKCQNCHGNIPVQVFVPVGDQTHSKSSEELSLPPPPPPPPPPPPPPPPPPPPLRALSSSSQAATHQNLGFRAPVKDDQPRPLVCESPAERPRDSLEVPAVRPPHASINEHILAAIRQGVKLKKVHPDLGPNPSSKPTSNRRTSDLERSIKAALQRIKRVSADSEEDSDEQDPGQWDG

SEQ ID NO: 4679 - protein, 334 aa, Homo sapiens
MQKAQTLDSKLKKAVPQNHFLNKTAPKTQADVTTVNGTQTNPNIKKKATAEDRRKQLEEWQKSKGKTYKRPPMELKTKRKVIKEMNISFWKSIEKEEEEKKAQLELSSKINNTLTECLNPIEGGVPSNEILNILSSIPEAEKFAKFWICKAKLLASKGTFDVIGLYEEAIKNGATPIQELRKVVLNILQDSNRTTEGITSDSLVAETSITSVEELAKKMESVKSCLSPKEREQVTATPRIAKAEQHNYPGIKLQIGPIPRINGMPEVQDMKFITPVRRSSRIERAVSRYPEMLQEHDLVVASLDELLEVEETKCFIFRRNEALPVTLGFQTPES

SEQ ID NO: 4680 - protein, 341 aa, Homo sapiens
MAFFPPIYLLHRQSWPTKIDVPQDLEDDLTATPLSHATVPQSPARAADSVLNGHRSKGLCDSAKKDDLPELAGPALSTVPPASLKPTASGRKCLFRVEEDEEEDEEDKKPMSLSTQVVLRRKPSVTNRLTSRKSAPVLNQIFEEGESDDEFDMDENLPPKLSRLKMNIASPGTVHKRYHRRKSQGRGSSCSSSETSDDDSESRRRLDKDSGFTYSWHRRDSSEGPPGSEGDGGGQSKPSNASGGVDKASPSENNAGGGSPSSGSGGNPTNTSGTTRRCAGPSNSMQLASRSAGELVESLKLMSLCLGSQLHGSTKYIIDPQNGLSFSSVKVQITSQDVLHS

SEQ ID NO: 4681 - protein, 473 aa, Homo sapiens [sequence omitted]

SEQ ID NO: 4682 - protein, 205 aa, Homo sapiens
MPDTAFPPSSRAGQTGPVVSGAQVSSWRERQPCSGSRGPSHILGTDANAGTAGKLGLVSFPGFRKKPTRSVLQNETFVSRSTADCKWLPFVAVSILSILRLDWFLLLALPCPTDHKGEQQEAPSKHPQMALDISHILRNMSCSGRAKASSKACGAGGSQARWGNPEPWGLPMGIGRSQGRVRGSTGGVRESPRALLAQGAVNTMD

SEQ ID NO: 4683 - protein, 123 aa, Homo sapiens [sequence omitted]

SEQ ID NO: 4684 - protein, 500 aa, Homo sapiens
MDILCSTLLLLTVPSWVLSQVTLKGSGPALVKPTQTLTLTCTFSGFSLSSSGMRVSWIRQPPGKALEWLARIDWDDDKFYSTSLKTRLTISKDTSKNQVVLTMTNMDPVDTATYYCARMADCIGGSCYDPQFVFDFWGQGILVTVSSASPTSPKVFPLSLCSTQPDGNVVIACLVQGFFPQEPLSVTWSESGQGVTARNFPPSQDASGDLYTTSSQLTLPATQCLAGKSVTCHVKHYTNPSQDVTVPCPVPSTPPTPSPSTPPTPSPSCCHPRLSLHRPALEDLLLGSEANLTCTLTGLRDASGVTFTWTPSSGKSAVQGPPERDLCGCYSVSSVLPGCAEPWNHGKTFTCTAAYPESKTPLTATLSKSGNTFRPEVHLLPPPSEELALNELVTLTCLARGFSPKDVLVRWLQGSQELPREKYLTWASRQEPSQGTTTFAVTSILRVAAEDWKKGDTFSCMVGHEALPLAFTQKTIDRLAGKPTHVNVSVVMAEVDGTCY

SEQ ID NO: 4685 - protein, 189 aa, Homo sapiens [sequence omitted]

SEQ ID NO: 4686 - protein, 115 aa, Homo sapiens [sequence omitted]

SEQ ID NO: 4687 - protein, 225 aa, Homo sapiens
MAPSRGFLAQSTCPWCLERSRSEEALLQGLVTSAAREPTGCGVRGPSSGVLQRDPQRQLRSKMCERTRFRPVLVYPAVGQRVSSGKEGWPQEVQPCHASCPQLQELHRAGGDLMHRDEQSRTLLHHAVSTGSKDVVRYLLDHAPPEILDAVEENGETCLHQAAALGQRTICHYIVEAGASLMKTDQQGDTPRQRAEKAQDTELAAYLENRQHYQMIQREDQETAV

SEQ ID NO: 4688 - protein, 193 aa, Homo sapiens
MVWDVGTGAAMLTLGPEVHPDTIYSVDWSRDGGLICTSCRDKRVRIIEPRKGTVVAEKDRPHEGTRPVRAVFVSEGKILTTGFSRMSERQVALWDTVSAGAGSRGPPGWEPRLEVSSLLCHSPGRMAMGLSLPRREMVVPTGWSGGPSQVTAQGRPPSQGLGCYLSPVSTEAPGGAAVPAGAGHQQRCPAALL

SEQ ID NO: 4689 - protein, 152 aa, Homo sapiens [sequence omitted]

SEQ ID NO: 4690 - protein, 115 aa, Homo sapiens
MNCGTWDYGRVWLQSRAEIPFPLTSLPSPSPDSVLQQGNKKGPLGRWDFDTQEEYSEYMNNKEALPKAAFQYGIKMSEGRKTRRFKETNDKAELDRQWKKISAIIEKRKKMEADG

SEQ ID NO: 4691 - protein, 344 aa, Homo sapiens [sequence omitted]

SEQ ID NO: 4692 - protein, 113 aa, Homo sapiens
MYPPLLSGTILIRILCFRAIINHFNPKIESYAAVNHISQLSEEQVLEVVRANYDTLTLKLQDGLDQYERYSEQHKEAAFFKELVRSISTNVRRNLAFHTLSQEVLLKEFSTIS

SEQ ID NO: 4693 - protein, 125 aa, Homo sapiens
MLPSQHQCVIISMEYCQARKLICGSAFKVFIAVSLNRMKCPLASTNKRFLINTIKNTLPSHKEQDHEQKEGDKEPAKSQAQKEENPKKHRSHPYKHSFRARGSASYSPPRKRSSQDKYEKRSNRR

SEQ ID NO: 4694 - protein, 168 aa, Homo sapiens [sequence omitted]

SEQ ID NO: 4695 - protein, 232 aa, Homo sapiens [sequence omitted]

SEQ ID NO: 4696 - protein, 107 aa, Homo sapiens
MAVFTQHGASYTSTLALPFLTSFHGDPFMSVWTATLFPQLHGAPRRSQLELPNPMTDPFIAAICTRVGVSIGHCQARMAGPKHVHFSFEAPVLRQCGLRPWESCGCQ

SEQ ID NO: 4697 - protein, 109 aa, Homo sapiens
MWLGGPAFPGTPGLSRWLGWSTRIERTRSRGSARTIARVSSRMGSGENRSLRCRARRRHPAWPDRARRLSSRRKMLEPRPMARKRLSQNHVGVSAGVIYSNTTPNTFGY

SEQ ID NO: 4698 - protein, 309 aa, Homo sapiens
MLLYCVPRVIQVGAQFQVRTRIDVAGMKVRELMDAEFPHSFLVSGKQRTLELQARSQEEMISWMQAFQAAIDQIEKRNETFKAAAQGPEGDIQEQELQSEELGLRAPQWVRDKMVTMCMRCQEPFNALTRRRHHCRACGYVVCARCSDYRAELKYDDNRPNRVCLHCYAFLTGNVLPEAKEDKRRGILEKGSSATPDQSLMCSFLQLIGDKWGKSGPRGWCVIPRDDPLVLYVYAAPQDMRAHTSIPLLGYQVTVGPQGDPRVFQLQQSGQLYTFKAETEELKGRWVKAMERAASGWSPSWPNDGDLSD

SEQ ID NO: 4699 - protein, 417 aa, Homo sapiens
MKCWDLENPTNQPTGSSPSPPLPLTDTSICQSEPPTMRLVGWRFGGRCMQRSQQSSKRSSRSVEDDKEGHLVCRIGDWLQERYEIVGNLGEGTFGKVVECLDHARGKSQVALKIIRNVGKYREAARLEINVLKKIKEKDKENKFLCVLMSDWFNFHGHMCIAFELLGKNTFEFLKENNFQPYPLPHVRHMAYQLCHALRFLHENQLTHTDLKPENILFVNSEFETLYNEHKSCEEKSVKNTSIRVADFGSATFDHEHHTTIVATRHYRPPEVILELGWAQPCDVWSIGCILFEYYRGFTLFQTHENREHLVMMEKILGPIPSHMIHRTRKQKYFYKGGLVWDENSSDGRYVKENCKPLKSYMLQDSLEHVQLFDLMRRMLEFDPAQRITLAEALLHPFFAGLTPEERSFHTSRNPSR

SEQ ID NO: 4700 - protein, 181 aa, Homo sapiens [sequence omitted]

SEQ ID NO: 4701 - protein, 106 aa, Homo sapiens [sequence omitted]

SEQ ID NO: 4702 - protein, 132 aa, Homo sapiens [sequence omitted]

SEQ ID NO: 4703 - protein, 622 aa, Homo sapiens [sequence omitted]

SEQ ID NO: 4704 - protein, 172 aa, Homo sapiens
MQMRKDSRRACWDRGWRRVHPHVHTSVCAWVAAAGSSTPACVLGWRRRVRPHVHTSVCARVAAAGSSTPACARVAAAGSSTPACVLGWRRRVRPHQRVCSGGGGGFVHTSVCARVAAAGSSTPACVLGWRRRVRPHQRVCSGGGGGFVHTSVCARGRTPQVECWTWARSRGV

SEQ ID NO: 4705 - protein, 182 aa, Homo sapiens
MGPFSSVTSLMVNEVALLTKRFPTFSTLVRPFSSVNTLMVNKAELLTKRFPTFPTVISSLSSVTLLMLNEVTLLTGGFPTFSTLVRPFSSVNKLMANKAALLTKRFPALLTGISCLSSVDSLMLNKAALSTIRFPTLSTIIRSFCSVISLMITEADISAKGFSTITAHITSISSEKFLVWNN

SEQ ID NO: 4706 - protein, 489 aa, Homo sapiens
MTATHHFSVDLNASRSLSQVAMDLHEAVSMKLHRVREALALMGFTTPLLLVLLYLQALFYRYCYLNWDHYDNIYITSRFLRMEAVRSTAGLPTVLPLSAHEARRYIPPGSIFLSQWEKFFYILETFNLIRHLLLVLFLVFLDYAVFWVLDLARHQLQGEIVARSPVLVSLTVEGTGYAGNIYRDLVSAFDVLQQGNISILSRRCLLRPSEPDSTGYIVIGVMYGLCFFITLFGSYVSRLRRVICASYYPSREQERISYLYNVLLSRRTNLLAALHRSVRRRAADQGHRSAFLVLASRCPCLGPFVSHFWLHQAYCLGCGQPQDEGDMENTVSCSTPGCQGLYCLTCFRLLDNTCSVCASPLSYQGDLDLELDSSDEEGPQLWLAAAQRKDPEQAWLLQQQLQEVLGRSLSMESTSESSDLDEEKGPQQRKHGQQPLPEAHQPVSILTSPEPHRPPETSSATKGAPTPASEPSVPLSPPSLPDPSHPPPK

SEQ ID NO: 4707 - protein, 100 aa, Homo sapiens
MVTCSGKGALVTVAGCRALVFFLPALSSRPCALNPKEPILPLCLAPEYDVYTSCLVSLYNRFLTVGTKAAAHQLSVSQRGASIQWILTQPCHSLCFFSHS

SEQ ID NO: 4708 - protein, 328 aa, Homo sapiens
MEKILIRPTAFKPVLPKPRGAPSLPSFMGPRATGLSGSQGSLTQLFGGPASSSSSSSSSSAADKPLAFSGWASGCPSGTLSDSGRNSLSSLPTYSTGGAEPTTSSPGGHLPSHGSGRGALPGPARGVPTGPSHSDSGRSSSSKSTGSLGGRVAGGLLGSGTRASPDSSSCGERSPPPPPPPPSDEALLHCVLEGKLRDREAELQQLRDSLDENEATMCQVWSEAMMGKGHGRTSQGAGITGVSHCTRPSACFFYFLRQGLILSPRLESSGVISAPCSLNPLGSSSPLTPASQVAETTGACHHTKLIFGLWRGRVLLCCLGWSRTPELK

SEQ ID NO: 4709 - protein, 105 aa, Homo sapiens
MLECSGMISAHCSLHRPGSSDFTPSASGVSGITDVRHHAWLISVFLVETAFHRVGQAGLEFLTSGDPPALASQSAGITGVSHHAQPASGPYFIALSICQAMKPLP

SEQ ID NO: 4710 - protein, 211 aa, Homo sapiens
MRPEVGREPAALQPRQRPRSDHQLHRSPFTVPPRTPACRSPGPSPPIAVALEVKPQLEDAIGKLAAEAVAVRVFPLAVDDLESDVLVGRPRVEAQDGEILVVGAGLQEVLGRGALVDEVGVEDVELVSLHDLGRWVVKVVVRLVVLVPLEARVHAVEEARLAWPVLVGPQDGGCPGSARTAAGKSFHHLWPQGQWASKPRMNEGTPQCACR

SEQ ID NO: 4711 - protein, 142 aa, Homo sapiens
MGSDAEGEKIKDSMKLIVPVLLDAAVPAYDKIRVLLLYILLRSGVSEENLAKLIQHANVQAHSSLIRNLEQLGGTVTNPGGSGTSSRLEPRERMEPTYQLSRWTPVIKDVMEVLGGRSGWGPALRIGWRLSLPPAEVLSLRA

SEQ ID NO: 4712 - protein, 105 aa, Homo sapiens
MERKELPPEHQSLKSSFEALLQRCSLSATDLKTKRKLEEAAQRLEYLYEKLCEGTVSTASCAPTASYTSTITMAKGSPVSFLPIGVTDLGSPQNTCILPGLGPRT

SEQ ID NO: 4713 - protein, 542 aa, Homo sapiens
MQGPPGPRGMQGPPHPHGIQGGPGSQGIQGPVSQGPLMGLNPRGMQGPPGPRENQGPAPQGMIMGHPPQEMRGPHPPGGLLGHGPQEMRGPQEIRGMQGPPPQGSMLGPPQELRGPPGSQSQQGPPQGSLGPPPQGGMQGPPGPQGQQNPARGPHPSQGPIPFQQQRTPLLGDGPRAPFNQEGQSTGPPPLIPGLGQQGAQGRIPPDRRGPHPDFPDDFSRPDDFHPDKRFGHRLREFEGRGGPLPQEEKWRRGGPGPPFPPDHREFSEGDGRGAARGPPGAWEGRRPGDERFPRDPEDPRFRGRREESFRRGAPPRHEGRAPPRGRDGFPGPEDFGPEENFDASEEAARGRDLRGRGRGTPRGGRKGLLPTPDEFPRFEGGRKPDSWDGNKEPGPGHEHFRDTPRPDHPPHDGHSPASRERSSSLQGMDMASLPPRKRPWHDGPGTSEHREMEAPGGPSEDRGGKGRGGPGPAQRVPKSGRSSSLDGEHHDGYHRDEPFGGPPGSGTPSRGGRSGSNWGRGSNMNSGPPRRGASRGGGRGR

SEQ ID NO: 4714 - protein, 108 aa, Homo sapiens
MQKAEESKVPEDSLEECAITCSNSHGPCDSNQPHKNIKITFEEDKVNSSLVVDRESSHDECQDALNILPGSLYFPCVSYLCLGYGRSILRTGCIYTYCYCFSQKLGWN

SEQ ID NO: 4715 - protein, 465 aa, Homo sapiens [sequence omitted]

SEQ ID NO: 4716 - protein, 144 aa, Homo sapiens [sequence omitted]

SEQ ID NO: 4717 - protein, 275 aa, Homo sapiens
MALQIPGGFWAAAVTVMLVMLSTPVAEARDFPKDFLVQFKGMCYFTNGTERVRGVARYIYNREEYGRFDSDVGEFQAVTELGRSIEDWNNYKDFLEQERAAVDKVCRHNYEAELRTTLQRQVEPTVTISPSRTEALNHHNLLVCSVTDFYPAQIKVRWFRNDQEETAGVVSTSLIRNGDWTFQILVMLEITPQRGDIYTCQVEHPSLQSPITVEWRAQSESAQSKMLSGIGGFVLGLIFLGLGLIIRHRGQKGPRGPPPAGNISAMIQSGERAQA

SEQ ID NO: 4718 - protein, 101 aa, Homo sapiens
MIALLYSSLGERARPCLNNKREREKGKKQKRKKEKERKERKEKEKKERRKEGKKERERKKRKKERKRERWKEGRKKKKERKKERKKERKKERKKDGRREGE

SEQ ID NO: 4719 - protein, 390 aa, Homo sapiens [sequence omitted]

SEQ ID NO: 4720 - protein, 161 aa, Homo sapiens
MSSHLPFYVTCARWLLCLQTSHLHSRQKGEGKSKRCVPNKSILKTNKGRGSRRKFKKKKKKNKNRKAVVSLKAPSSRLLPVTHYPVMWPRLDSRQSEEVSVSKRHMDATDKIKFPWLKEKRTIEFGEAAGYVCHRRYKDMEPHEKMGEAAKKVHWVQMRSR

SEQ ID NO: 4721 - protein, 114 aa, Homo sapiens [sequence omitted]

SEQ ID NO: 4722 - protein, 275 aa, Homo sapiens [sequence omitted]

SEQ ID NO: 4723 - protein, 222 aa, Homo sapiens
MKPQNLGEARPAPACLPPPDSLLPSRPRVQDLRRCCSPARIWKRAGSSGLPSGRSPVRIGEQKWFGRWHSSRGRNPTRIQQWKRTGNPARSGPKGLGWLGERSGAQGHTLGPNRWALGGSFIHPISPEHPSQARPRLAMEDTQAGQGWPRSGLPGQEPNPTLTAVRPGREFTQDRKAEGRGHARQKGRGQGSRPQLIPTAPPSTLLCLPSNRSCRSKWLWTR

SEQ ID NO: 4724 - protein, 185 aa, Homo sapiens
MSKDKCWDPFFAATSKSEQQALRGAWEPLRKGHCPCLISCPPLHSLLSYLTVTGCMLNMVSAAPKSTRRRQGCHSDMNRSSYLNVQTSATGALGGKTSMTASLSLETYADQAGSGARVCRRFFRTYHLSYIDVPFKAREEVWSCGELCAGNMRVCIVFLALPRLSEESIWATGVRSRHPCLLFSR

SEQ ID NO: 4725 - protein, 109 aa, Homo sapiens
MSSWDYRCSPSHPANYYYYYFLRQSFILVAQAGVQWHDLGSLQPLLPRFKRFSCLSLPGSWDYRHEPPCPANFVFLVETGFSMLVRLVSNFQPQVIHLPWPPKVLGLQA

SEQ ID NO: 4726 - protein, 629 aa, Homo sapiens
MVRGARQPQQPRSRLAPRLTGTVEKPPRKRRSSIRGSGDSSHSQSQGERYQHFTEKTEFALKEIMSSGGAEDDIPQGERKTVTDFCYLLDKSKQLFNGLRDLPQYGQKQWQSYFGRTFDVYTKLWKFQQQHRQVLDNRYGLKRWQIGEIASKIGQLYYHYYLRTSETSYLNEAFSFYSAIRQRSYYSQVNKEDRPELVVKKLRYYARFIVVCLLLNKMDVVKDLVKELSDEIEDYTHRFNTEDQVEWNLVLQEVAAFIEADPVMVLNDDNTIVITSNRLAETGAPLLEQGMIVGQLSLADALIIGNCNNQVKFSELTVDMFRMLQALEREPMNLASQMNKPGMQESADKPTRRENPHKYLLYKPTFSQLYTFLAASFKELPANSVLLIYLSATGVFPTGRSDSEGPYDFGGVLTNSNRDIINGDAIHKRNQSHKEMHCLHPGDLYPFTRKPLFIFVDSSNSVAYKNFTNLFGQPLVCLLSPTAYPKALQDQSQRGSLFTLFLNNPLMAFLFVSGLSSMRRGLWEKCQEYLRKINRDIAQLLTHSRSIDQAFLQFFGDEFLRLLLTRFIFCSATMRTHKIFRETRNYPESYPQLPRDETVENPHLQKHILELASILDVRNVFFENTIDDY

SEQ ID NO: 4727 - protein, 315 aa, Homo sapiens [sequence omitted]

SEQ ID NO: 4728 - protein, 128 aa, Homo sapiens [sequence omitted]

SEQ ID NO: 4729 - protein, 203 aa, Homo sapiens [sequence omitted]

SEQ ID NO: 4730 - protein, 132 aa, Homo sapiens
MTETTVKTAAWFMANMQVSGGGPSISLVMKTPRVTKNEALWHPTLNLPLSPQGTVRTAVEFQVMTQTQSLSFLLGSSASLDCGFSMAPGLDLISVEWRLQHKGRGRGDLHLPDHHLSVPSSADHPAQHPSFP

SEQ ID NO: 4731 - protein, 183 aa, Homo sapiens
MRAPGLAARESFAKFPSPVRPARAGTPTRPARSPLRSPRTACLPARVARLGMAMKPRAWPGPRADLRATRSARSANAARRAASCSDFFPAKTRHLGVAGPQEAVPGAGACLLIGRRSGGKRERGWGAPPPLSTAPPPSGPRLRPALRALLGAPSVQRGCVAGPGHPPHVDTPGALGTPRVQTP

SEQ ID NO: 4732 - protein, 115 aa, Homo sapiens
MGFLHVGQACLRLPTSGDAPASASRSAGMTGVSHRARQQLLTFSHSFLWRRPLSTVKCECVKVEPLPRRPLLCQGQLWRSGLLSSGAVSKWDEPDVAPVAASLRLSGISRLFLDD

SEQ ID NO: 4733 - protein, 564 aa, Homo sapiens
MGPFLLNAVRWLARGQTGKVGVNTNLKDLCPLLSEHGLQCSLEPHLNSDLCVYCCKAYSDKEAKQLQEFVAEGGGLLIGGQAWWWASQNPGHCPLAGFPGNIILNCFGLSILPQTLKAGCFPVPTPEMRSYHFRKALSQFQAILNHENGNLEKSCLAKLRVDGAAFLQIPAEGVPAYISLHRLLRKMLRGSGLPAVSRENPVASDSYEAAVLSLATGLAHSGTDCSQLAQGLGTWTCSSSLYPSKHPITVEINGINPGNNDCWVSTGLYLLEGQNAEVSLSEAAASAGLRVQIGCHTDDLTKARKLSRAPVVTHQCWMDRTERSVSCLWGGLLYVIVPKGSQLGPVPVTIRGAVPAPYYKLGKTSLEEWKRQMQENLAPWGELATDNIILTVPTTNLQALKDPEPVLRLWDEMMQAVARLAAEPFPFRRPERIVADVQISAGWMHSGYPIMCHLESVKEIINEMDMRSRGVWGPIHELGHNQQRHGWEFPPHTTEATCNLWSVYVHETVLGIPRAQAHEALSPPERERRIKAHLGKGAPLCDWNVWTALETYLQVLSRNSGRRG

SEQ ID NO: 4734 - protein, 126 aa, Homo sapiens [sequence omitted]

SEQ ID NO: 4735 - protein, 150 aa, Homo sapiens
MNPLSPYLNVDPRYLVQDTDEFILPTGANKTWGRFELAFFTIGGCCMTGAAFGAMNGLRLGLKETQNMAWSKPGNVQILNMVTRQGALWANTLGSLALLYSAFGVIIEKTRGAEDDLNTVAAGTMTGMLYKCTVSEMALDSPFCVLLSGS

SEQ ID NO: 4736 - protein, 207 aa, Homo sapiens
MNCLVDGNIPPSSGLSSSSALVCCAGLVTLTVLGRNLSKVELAEICAKSERYIGTEGGGMDQSISFLAEEGTAKLIEFSPLRATDVKLPSGAVFVIANSCVEMNKAATSHFNIRVMECRLAAKLLAKYKSLQWDKVLRLEEVQAKLGISLEEMLLVTEDALHPEPYNPEEICRCLGISLEELRTQILSPNTQDDGVVLYRPGWSATA

SEQ ID NO: 4737 - protein, 279 aa, Homo sapiens
MLMILSLLLFPASPLLSDKHKHSRENSCLSPRERPCSAIYPTPVEPSQRMLFNHIGDGALPRSDPNLSAPEKAVNPTPSSWSLDSGKEAKNMSDSGKLISPPVPPRPTQTASPARHTTSVSPSPAGRSPLKGSVQSFTPSPVEYHSPGLISNSPVLSGSYSSGISSLSRCSTSETSGFENQVNEQSAPLPVPVPVPVPSYGGEEPVRKESKTPPPYSVYERTLRRPVPLPHSLSIPVTSEPPALPPKPLAARSSHLENGARRTDPGPRPRPLPRKVSQL

SEQ ID NO: 4738 - protein, 471 aa, Homo sapiens [sequence omitted]

SEQ ID NO: 4739 - protein, 168 aa, Homo sapiens
MLPEGLARKGAEGSGGRDGSGEEPGKGKVMGWAGGKKLEAQGRRESRGKARAAPWFPSPAEPSLSWGKDFHLVSPLAKAHTHTETCRGQHGVHPSCPQVHTCVDTHTDAGTRRGEQTSTPPHTDGLFWAGCGWPWAVTTAQPSDSRGRAEGHSLPGWPGKHCSAPGWS

SEQ ID NO: 4740 - protein, 140 aa, Homo sapiens
MKVTGTPPAEFVQRLQSDEAKNYMKGLPELEKKDFASILTNASPLAVNLLEKMLVLDAEQRVTAGEALAHPYFESLHDTEDEPQVQKYDDSFDDVDRTLDEWKREWGAPGTACVDPSGGLWAGPVWTRELGALGRACVNP

SEQ ID NO: 4741 - protein, 259 aa, Homo sapiens [sequence omitted]

SEQ ID NO: 4742 - protein, 121 aa, Homo sapiens [sequence omitted]

SEQ ID NO: 4743 - protein, 178 aa, Homo sapiens
MENWTMGLWQTCVIQEEVGMQCKDFDSFLALPAELRVSRILMFLSNGLGFLGLLVSGFGLDCLRIGESLRDLKRRLLILGGILSWASGVTALVPVSWVAHKTVQEFWDENVPDFVPRWEFGEALFLGWFAGLSLLLGGCLLHCAACSSHAPLASGHYAVAQTQDHHQELETRNTNLKH

SEQ ID NO: 4744 - protein, 509 aa, Homo sapiens
MEFSWLETRWARPFYLAFVFCLALGLLQAIKLYLRRQRLLRDLRPFPAPPTHWFLGHQKFIQDDNMEKLEEIIEKYPRAFPFWIGPFQAFFCIYDPDYAKTLLSRTDPKSQYLQKFSPPLLGKGLAALDGPKWFQHRRLLTPGFHFNILKAYIEVMAHSVKMMLDKWEKICSTQDTSVEVYEHINSMSLDIIMKCAFSKETNCQTNSTHDPYAKAIFELSKIIFHRLYSLLYHSDIIFKLSPQGYRFQKLSRVLNQYTDTIIQERKKSLQAGVKQDNTPKRKYQDFLDIVLSAKDESGSSFSDIDVHSEVSTFLLAGHDTLAASISWILYCLALNPEHQERCREEVRGILGDGSSITWDQLGEMSYTTMCIKETCRLIPAVPSISRDLSKPLTFPDGCTLPAGITVVLSIWGLHHNPAVWKNPKVFDPLRFSQENSDQRHPYAYLPFSAGSRNCIGQEFAMIELKVTIALILLHFRVTPDPTRPLTFPNHFILKPKNGMYLHLKKLSEC

SEQ ID NO: 4745 - protein, 462 aa, Homo sapiens
MSSVKRSLKQEIVTQFHCSAAEGDIAKLTGILSHSPSLLNETSENGWTALMYAARNGHPEIVQFLLEKGCDRSIVNKSRQTALDIAVFWGYKHIANLLATAKGGKKPWFLTNEVEECENYFSKTLLDRKSEKRNNSDWLLAKESHPATVFILFSDLNPLVTLGGNKESFQQPEVRLCQLNYTDIKDYLAQPEKITLIFLGVELEIKDKLLNYAGEVPREEEDGLVAWFALGIDPIAAEEFKQRHENCYFLHPPMPALLQLKEKEAGVVAQARSVLAWHSRYKFCPTCGNATKIEEGGYKRLCLKEDCPSLNGVHNTSYPRVDPVVIMQVIHPDGTKCLLGRQKRFPPGMFTCLAGFIEPGETIEDAVRREVEEESGVKVGHVQYVACQPWPMPSSLMIGCLALAVSTEIKVDKNEIEDARWFTREQVLDVLTKGKQQAFFVPPSRAIAHQLIKHWIRINPNL

SEQ ID NO: 4746 - protein, 223 aa, Homo sapiens
MTGTPGAVATRDGEAPERSPPCSPSYDLTGKVMLLGDTGVGKTCFLIQFKDGAFLSGTFIATVGIDFRNKVVTVDGVRVKLQIWDTAGQERFRSVTHAYYRDAQALLLLYDITNKSSFDNIRAWLTEIHEYAQRDVVIMLLGNKADMSSERVIRSEDGETLAREYGVPFLETSAKTGMNVELAFLAIAKELKYRAGHQADEPSFQIRDYVESQKKRSSCCSFM

SEQ ID NO: 4747 - protein, 519 aa, Homo sapiens
MEQEKFDLQKQHTENIQELLEDTNVRLNKMESEYMAQTQSTNHMIKELEARVQQLTGEAENSNLQRQKLIQEKAELERCYQITCSELQEVKARRNTLHKEKDHLVNDYEQNMKLLQTKYDADINLLKQEHALSASKASSMIEELEQNVCQLKQQLQESELQRKQQLRDQENKFQMEKSHLKHIYEKKAHDLQSELDKGKEDTQKKIHKFEEALKEKEEQLTRVTEVQRLQAQQADAALEEFKRQVELNSEKVYAEMKEQMEKVEADLTRSKSLREKQSKEFLWRLEDIRQRYEQQIVELKLEHEQEKTHLLQQHNAEKDSLVRDHEREIENLEKQLRAANMEHENQIQEFKKRDAQVIADMEAQVHKLREELINVNSQRKQQLVELGLLREEEKQRATREHEIVVNKLKAESEKMKIELKKTHAAETEMTLEKVLQDELENRSNQVRCAEKKLQHKELESQEQITYIRQEYETKLKGLMPASLRQELEDTISSLKSQVNFLQKRASILQEELTTYQGRR

SEQ ID NO: 4748 - protein, 336 aa, Homo sapiens
MDPLGPAKPQWSWRCCLTTLLFQLLMAVCFFSYLRVSQDDPTVYPNGSRFPDSTGTPAHSIPLILLWTWPFNKPIALPRCSEIVHHREVMYNPSAQLPRSPRRRGQRWIWFSMESPSHCWQLKAMDGYFNLTMSYRSDSDIFTPYGWLEPWSGQPAHPPLNLSAKTELVAWAVSNWGPNSARVRYYQSLQAHLKVDVYGRSHKPLPQGTMMETLSRYKFYLAFENSLHPDYITEKLWRNALEAWAVPVVLGPSRSNYERFLPPDAFIHVDDFQSPKDLARYLQELDKDHARYLSYFRWRETLRPRSFSWALAFCKACWKLQEESRYQTRGIAAWFT

SEQ ID NO: 4749 - protein, 432 aa, Homo sapiens
MDNLCFVGLISMIDPPRAAVPDAVSKCRSAGIKVIMVTGDHPITAKAIAKGVGIISEGTETAEEVAARLKIPISKVDASAAKAIVVHGAELKDIQSKQLDQILQNHPEIVFARTSPQQKLIIVEGCQRLGAVVAVTGDGVNDSPALKKADIGIAMGISGSDVSKQAADMILLDDNFASIVTGVEEGRLIFDNLKKSIMYTLTSNIPEITPFLMFIILGIPLPLGTITILCIDLGTDMVPAISLAYESAESDIMKRLPRNPKTDNLVNHRLIGMAYGQIGMIQALAGFFTYFVILAENGFRPVDLLGIRLHWEDKYLNDLEDSYGQQWTYEQRKVVEFTCQTAFFVTIVVVQWADLIISKTRRNSLFQQGMRNKVLIFGILEETLLAAFLSYTPGMDVALRMYPLKWSFALTAQAGVKWRILGLLQPLPPRFK

SEQ ID NO: 4750 - protein, 107 aa, Homo sapiens [sequence omitted]

SEQ ID NO: 4751 - protein, 426 aa, Homo sapiens [sequence omitted]

SEQ ID NO: 4752 - protein, 149 aa, Homo sapiens [sequence omitted]

SEQ ID NO: 4753 - protein, 174 aa, Homo sapiens [sequence omitted]

SEQ ID NO: 4754 - protein, 516 aa, Homo sapiens
MLVYDQQEVEAIFLVILVVVIIGEFFSASSVTIVDTVTLQYLGKHRDRYGLQRMWGSLGWGLAMLSVGTGIDYTHIEVLIDGKGCKPPEYRNYQIVFIVFGVLMTMALIVATQFRFRYNHFKNDDSKGKEVEIPQVERNNSTESSEETPTTTSHSQAFNFWDLIKLLCSVQYGSVLFVAWFMGFGYGFVFTFLYWHLEDLNGTTTLFGVCSVLSHVSELTAYFFSHKLIELIGHIRVLYIGLACNTARYIYISYLENAWTVLPMEVLQGVTHAAIWAACISYLSAAVPPELRTSAQGILQGLHLGLGRGCGAMIGGVLVNYFGAAATFRGIGMACLVILLLFALIQWLAVPDEEEDKTMLAERIPVPSSPVPIATIDLVQQQTEDVMPRIEPRLPPKKTKHQEEQEDVNKPAWGVSSSPWVTFVYALYQIKEMMQLTRDNRASEIQPLQGTNENRENSPAGRAQPVPCETHSDPSRNQPSPDAAASQTQTSPAHPSVDPCTEESEEQQAQLAAGGH

SEQ ID NO: 4755 - protein, 448 aa, Homo sapiens
MSHRAWLALLPLEVDGDDGLCGAGGPEHSGSSQPQQQQQRAPCHLRASGRGRGARLLTRLLPFSFLEMMEARSRGHASPLAANGQSPSPGSQSPVVPAGAVSTGSSSPGTPQPAPQLPLNAAPPSSVPPVPPSEALPPPACPSAPAPRRSIISRLFGTSPATEAAPPPPEPVPAAQGPATVQSVEDFVPDDRLDRSFLEDTTPARDEKKVGAKAAQQDSDSDGEALGGNPMVAGFQDDVDLEDQPRGSPPLPAGPVPSQDITLSSEEEAEVAAPTKGPAPAPQQCSEPETKWSSIPASKPRRGTAPTRTAAPPWPGGVSVRTGPEKRSSTRPPAEMEPGKGEQASSSESDPEGPIAAQMLSFVMDDPDFESEGSDTQRRADDFPVRDDPSDVTDEDEGPAEPPPPPKLPLPAFRLKNDSDLFGLGLEEAGPKESSEEGKEGKTPSKEK

SEQ ID NO: 4756 - protein, 102 aa, Homo sapiens [sequence omitted]

SEQ ID NO: 4757 - protein, 203 aa, Homo sapiens
MEDAKVYVAKVDCTAHSDVCSAQGVRGYPTLKLFKPGQEAVKYQGPRDFQTLENWMLQTLNEEPVTPEPEVEPPSAPELKQGLYELSASNFELHVAQGDHFIKFFAPWCGHCKALAPTWEQLALGLEHSETVKIGKVDCTQHYELCSGNQVRGYPTLLWFRDGKKVDQYKGKRDLESQLSPRLTRALCWHSLKITSMTPLQKE

SEQ ID NO: 4758 - protein, 487 aa, Homo sapiens
MASTADGDMGETLEQMRGLWPGVEDLSLNKLATSLGASEQALRLIFSIFLGYPLALFYRHYLFYKDSYLIHLFHTFTGLSIAYFNFGHQFYHSLLCVVLQFLILRLMGRTVTAVITTLCFQMAYLLAGYYYTATGDYDIKWTMPHCVLTLKLIGLCIDYYDGGKDGNSLTSEQQKYAIRGVPSLLEVAGFSYFYGAFLVGPQFSMNHYMKLVRGQLTDIPGKMPNSTIPALKRLSLGLVYLVGYTLLSPHITDDYLLTEDYDNRPFWFRCMYMLIWGKFVLYKYVTCWLVTEGVCILSGLGFNGFDENGTVRWDACANMKVWLFETTPRFNGTIASFNINTNAWVARYIFKRLKFLGNKELSQGLSLLFLALWHGLHSGYLICFQMEFLIVIVEKQVSSLIRDSPALSSLASITALQPFYYLVQQTIHWLFMGYSMTAFCLFTWDKWLKVYRSIYFLGHVFFLSLLFILPYIHKAMVPRKEKLKKRE

SEQ ID NO: 4759 - protein, 444 aa, Homo sapiens
MRMDSQKKIAKINVGKRIALVENIPEGLNYSENAPFHLSLFQGWMNLLNMAKKSVDIVSSHWDLNHTHPSACQGQRLFEKLLQLTSQNIEIKLVSDVTADSKVLEALKLKGAEVTYMNMTAYNKGRLQSSFWIVDKQHVYIGSAGLDWQSLGQMKELGVIFYNCSCLVLDLQRIFALYSSLKFKSRVPQTWSKRLYGVYDNEKKLQLQLNETKSQAFVSNSPKLFCPKNRSFDIDAIYSVIDDAKQYVYIAVMDYLPISSTSTKRTYWPDLDAKIREALVLRSVRVRLLLSFWKETDPLTFNFISSLKAICTEIANCSLKVKFFDLERENACATKEQKNHTFPRLNRNKYMVTDGAAYIGNFDWVGNDFTQNAGTGLVINQADVRNNRSIIKQLKDVFERDWYSPYAKTLQPTKQPNCSSLFKLKPLSNKTATDDTGGKDPRNV

SEQ ID NO: 4760 - protein, 174 aa, Homo sapiens
MAPANLGLTPHWVMLLGAVLLLLLSGASAQEPPRVGCSEYTNRSCEECLRNVSCLWCNENKACMDYPVRKILPPASLCKLSSARWGVCWVNFEALIITMSVLGGSVLLGITVCCCYCCRRKKSRKPDKSDERAMREQEERRVRQEERRAEMKSRHDEIRKKYGLFKEQNPYEKF

SEQ ID NO: 4761 - protein, 216 aa, Homo sapiens
MAILPGEAPVPGPGWPEPDAGGASVALGLPVPVCSSSASALQEQHLLDELSRAQAWSGPSRGALGSALPPELPPTGILPTASPSPLAPDPPRIILPTVPQPPATIIQQLPQQPLIAQIPPPQAFPTQRSGSIKEDMVELLLLQNAQVHQLVLQNWMLKALPPALQDPPHVPPRVPRAARPRLPAVHHHHHHHHAVWPPGAATVLQPAPSLWTPGPP

SEQ ID NO: 4762 - protein, 181 aa, Homo sapiens [sequence omitted]

SEQ ID NO: 4763 - protein, 108 aa, Homo sapiens [sequence omitted]

SEQ ID NO: 4764 - protein, 145 aa, Homo sapiens
MVIYFGTAYVALTRDFANFVLQDQLALDLLSWSKDTYSPDEHFWVTLNRIPGVPGSMPNASWTGNLRAIKWSDMEDRHGGCHGHYVHGICIYGNGDLKWLVNSPSLFANKFELNTYPLTVECLELRHRERTLNQSETAIQPSWYF

SEQ ID NO: 4765 - protein, 275 aa, Homo sapiens
MANFKGHALPGSFFLIIGLCWSVKYPLKYFSHTRKNSPLHYYQRLEIVEAAIRTLFSVTGILAEQFVPDGPHLHLYHENHWIKLMNWQHSTMYLFFAVSGIVDMLTYLVSHVPLGVDRLVMAVAVFMEGFLFYYHVHNRPPLDQHIHSLLLYALFGGCVSISLEVIFRDHIVLELFRTSLIILQGTWFWQIGFVLFPPFGTPEWDQKDDANLMFITMCFCWHYLAALSIVAVNYSLVYCLLTRMKRHGRGEIIGIQKLNSDDTYQTALLSGSDEE

SEQ ID NO: 4766 - protein, 555 aa, Homo sapiens
MNRSIPVEVDESEPFPSQLLKPIPEYSPEEELEPPAPNTRNMAPSSLSVLQCPPLKLANHQPVSQQVTCLRAKVLEEGEASFFRRHPELGKDISSCSSGASEPESELGALPPEHRFTLTEKRNRWLGSQLSAASPDTGHESDKSDPSLPNALADSFSGGQEMMPRPRPRPGPHRHRAAPDVPTIDTGYDSQPQDVLGIRQLERPLPLTSSCYLQDLPGPLRSRELPPQFELERYPMNAQLLPPHPSPQAPWNCQYYCPGGPYHHQVPHGHGYPPAAAYQQVLQPALPGQVLPGARARGPRPVQKVILNDSSPQDQEERPAQRDFSFPRLPRDQLYRPPSNGVEAPEESLDLPAELRPHGPQAPSLAAVPRPPSNPLARGTLRTSNLPEELRKVFITYSMDTAMEVVKFVNFLLVNGFQTAIDIFEDRIRGIDIIKWMERYLRDKTVMIIVAISPKYKQDVEGAESQLDEDEHGLHTKYIHRMMQIEFISQGSMNFRFIPVLFPNAKKEHVPTWLQNTHVYSWPKNKKNILLRLLREEEYVAPPRGPLPTLQVVPL

SEQ ID NO: 4767 - protein, 520 aa, Homo sapiens
MDLGLRWVLLAAILEGVQCEPQMVESGGGLVKPGGSLRLSCGGFGFTFSSYNLIWVRQAPGKGLEWVSYISASGDAIYYADSVRGRFTISRDNDMNLLYLQMTSLRREDAATYYCTREARNFEVTGLDVFDVWGQGTMVMVSSASTKGPSVFPLAPCSRSTSGGTAALGCLVKDYFPEPVTVSWNSGALTSGVHTFPAVLQSSGLYSLSSVVTVPSSSLGTQTYTCNVNHKPSNTKVDKRVELKTPLGDTTHTCPRCPEPKSCDTPPPCPRCPEPKSCDTPPPCPRCPEPKSCDTPPPCPRCPAPELLGGPSVFLFPPKPKDTLMISRTPEVTCVVVDVSHEDPEVQFKWYVDGVEVHNAKTKPREEQFNSTFRVVSVLTVLHQDWLNGKEYKCKVSNKALPAPIEKTISKTKGQPREPQVYTLPPSREEMTKNQVSLTCLVKGFYPSDIAVEWESSGQPENNYNTTPPMLDSDGSFFLYSKLTVDKSRWQQGNIFSCSVMHEALHNRFTQKSLSLSPGK

SEQ ID NO: 4768 - protein, 296 aa, Homo sapiens
MPKKSMFFHAKSDRDDCPKPLEQCTVPKEAQSNRTHSELFANSKNLEDREMSNPDPENSALRHFAHWFQDLKECYSSKHLVYWSLWWASATAGYNQILNYVQVLWEHKAPSQDSSIYNGAVEAIATFGGALASFSVGYLKVNWDLLGELGLAVFSAVIAGSLFLMNYSRSIWVCYAGYLLVKSSYSFLITIAVFQIAVNLSLERYALVFGIDTFIALVIQTIMTMIVVDQRGLQLPVTTQFLVYGSYFAVIAGVFLMRSIYILCSAKCRKEVQNLATTRSPNEPHPQEPSNVSTKF

SEQ ID NO: 4769 - protein, 148 aa, Homo sapiens
MGPSSSSAGTWKAWPGVGAPLPCRPLCAGLSSGVPSPKACTHHGFCGTSDNTMPGTSCSHHPWAARAETAAVARCTCLASGWPRRLARLQGPRGTCPYCWAPEFLLLGTVRAVRLRLCLSLQKCPGPVRGALGAGAGGGDPAEPDGQD

SEQ ID NO: 4770 - protein, 198 aa, Homo sapiens
MDLPKLASDDRPSPPRGLVAAYSGESDSEEEQERGGPEREEKLTDWQKLACLLCRRQFPSKEALIRHQQLSGLHKQNLEIHRRAHLSENELEALEKNDMEQMKYRDRAAERREKYGIPEPPEPKRRKYGGISTASVDFEQPTRDGLGSDNIGSRMLQAMGWKEGSGLGRKKQGIVTPIEALASLEPKGIPLEQVPRPP

SEQ ID NO: 4771 - protein, 666 aa, Homo sapiens
MDLVAFEDVAVNFTQEEWSLLDPSQKNLYREVMQETLRNLASIGEKWKDQNIEDQYKNPRNNLRSLLGERVDENTEENHCGETSSQIPDDTLNKKTSPGVKSCESSVCGEVFVGHSSLNRHIRADTAHKPSEYQEYGQEPYKCQQRKKAFRCHPSFQMQEKAHTGEKLYDCKECGKTFISHSSIQRHMIMHNGDGTYKCKFCGKACPCLSIYLIHERVHTGEKPYKCKQCGKAFSYSTSLQIHERTHTGEKPYECKECGKAFGSPNSLYEHRRTHTGEKPYECKQCGKAFRWFHSFQIHERTHSEEKAYECTKCGKAFKCPSYLCRHEVTHSGKKPCECKQCGKALSYLNFQRHMKMHTRMRPYKCKTVEKPLILPVRFEDMKELTLERNLMNASTVVKPSIVPVPFTIMKGLTLERNPMNVSSVVKPSFLPLPFDIMKGLTLERNRMSVSNVGKPSDLPHTFKCMEGLTLKRNPMNVSSVVKPSFFPLPFDIMKGLTLERNPMSVSNVGKPSHLPHTFKCMKGLTLESNCMNLNNVKKPLDLSETFKFMKRHTLERNPIRNMEKHSTISLPFKYMQQCTEDRMPMNVKSVTKHSYLPRSFEYMQEHTLERNPMNVRNAEKRSIIFLLCVYTKGCTLERNHINVRIVGKHSVCLVPFVDIKGLTLE

SEQ ID NO: 4772 - protein, 142 aa, Homo sapiens
MLGFGGYRRGMSWPLPQGSPLQQPSMTPNARGLQEGRGPNATSGQPSPSCFSLPPCSRDLKRDVAKKLEKLKKRTQRAIAELIRKCSAWEGGVLPTGWWPKHRAPPHPFCLPSIPGERLKGQEDSLASAVDAATEQKTCDSD

SEQ ID NO: 4773 - protein, 593 aa, Homo sapiens
MLRTSVLRLLGRTGASRLSLLEDFGPRYYSSGSLSAGDDACDVRAYFTTPIFYVNAAPHIGHLYSALLADALCRHRRLRGPSTAATRFSTGTDEHGLKIQQAAATAGLAPTELCDRVSEQFQQLFQEAGISCTDFIRTTEARHRVAVQHFWGVLKSRGLLYKGVYEGWYCASDECFLPEAKVTQQPGPSGDSFPVSLESGHPVSWTKEENYIFRLSQFRKPLQRWLRGNPQAITPEPFHHVVLQWLDEELPDLSVSRRSSHLHWGIPVPGDDSQTIYVWLDALVNYLTVIGYPNAEFKSWWPATSHIIGKDILKFHAIYWPAFLLGAGMSPPQRICVHSHWTVCGQKMSKSLGNVVDPRTCLNRYTVDGFRYFLLRQGVPNWDCDYYDEKVVKLLNSELADALGGLLNRCTAKRINPSETYPAFCTTCFPSEPGLVGPSVRAQAEDYALVSAVATLPKQVADHYDNFRIYKALEAVSSCVRQTNGFVQRHAPWKLNWESPVDAPWLGTVLHVALECLRVFGTLLQPVTPSLADKLLSRLGVSASERSLGELYFLPRFYGHPCPFEGRRLGPETGLLFPRLDQSRTWLVKAHRT

SEQ ID NO: 4774 - protein, 707 aa, Homo sapiens [sequence omitted]

SEQ ID NO: 4775 - protein, 508 aa, Homo sapiens
MSASALSSIRFPGSISEYLQVASVLSLLLLLFKTAQLYLHRQWLLSSTQQFPSPPSHWLFGHKILKDQDLQDILTRIKNFPSACPQWLWGSKVRIQVYDPDYMKLILGRSDPKAHGSYRFLAPWIGRGLLLLDGQTWFQHRRMLTPAFHYDILKPYTEIMADSVRVMLDKWEQIVGQDSTLEIFQHITLMTLDTIMKCAFSHEGSVQLDRKYKSYIQAVEDLNNLFFLRVRNIFHQNDIIYRVSSNGCLANSACQLAHDHTDQVIKSRRSQLQDEEELEKLKKKRRLDFLDILLFARMENGKSLSDKDLRAEVDTFMFEGHDTTASGISWIFYALATNPEHQQRCRKEIQSLLGDGASITWNDLDKMPYTTMCIKEALRIYPPVPSVSRELSSPVTFPDGRSLPKGIHVMLSFYGLHHNPTVWPNPEVFDPSRFAPGSSRHSHSFLPFSGGARNCIGKQFAMNELKVAVALTLLRFELLPDPTRVPIPIPRIVLKSKNGIHLHLKKLQ

SEQ ID NO: 4776 - protein, 135 aa, Homo sapiens
MAGDSHSLLPGEPQGDRSLCPEPYLQLPALCPGHFYSCFNLMLAGACSSVSSCLGRTLPQVPILPPPLPLLQAPSEAGKAQPWSSAPMSWLSTCRKVKLTASHLPLRVLKCGAHDWVPPMKTTHEQQLITSLISG

SEQ ID NO: 4777 - protein, 133 aa, Homo sapiens [sequence omitted]

SEQ ID NO: 4778 - protein, 172 aa, Homo sapiens
MAEMRARMQQQLDEYQELLDIKLALDMEIHAYRKLLEGEEERLRLSPSPTSQRSRGRASSHSSQTQGGGSVTKKRKLESTESRSSFSQHARTSGRVAVEEVDEEGKFVRLRNKSNEDQSMGNWQIKRQNGDDPLLTYRFPPKFTLKAGQVVTVSGRALGTLGRPWVAMGALG

SEQ ID NO: 4779 - protein, 112 aa, Homo sapiens
MATAAAAAAVMAPPGCPGSCPNFAVVCSFLERYGPLLDLPELPFPELERVLQAPPPDVGNGEVPKELVELHLKLMRKIGKSVTADRWEKYLIKVTSICKFPALLLKYYSSIN

SEQ ID NO: 4780 - protein, 252 aa, Homo sapiens [sequence omitted]

SEQ ID NO: 4781 - protein, 153 aa, Homo sapiens
MAPEENAGTELLLQGFERRFLAVRTLRSFPWQSLEAKLRDSSYSELLRDILQKTVRHPVCVKHPPSVKYAWCFLSELIKKSSGGSVTLSKSTAIISHGTTGLVTWDAALYLAEWAIENPAAFINRRAVLPRSHRVAGRGPAEAGCLPGAQAGS

SEQ ID NO: 4782 - protein, 142 aa, Homo sapiens
MGSWAFHITPFLLRLSESHRPFPWISFGAKKQRSFVFVFSLWNDFLLSVLFKFRRSYSGICTFPCYSSCLMNFIHLHFSMWLAWTGGRTLWPHGTLRTQGRASAGKELPGLTELHLTVLFLAIFCCLFLCVDFVPGKIFHSE

SEQ ID NO: 4783 - protein, 129 aa, Homo sapiens [sequence omitted]

SEQ ID NO: 4784 - protein, 128 aa, Homo sapiens
MGPSALLEPGPSPSCLQLGLPTPADLLHAENRASLLFRPEAVMSTGPRNHAHPLKLEHQAWVSPGWLDLVKMGERAASASRTHPQWTGSSSAFSFSAAFSGNRERGSCLNLQHGLCTGGPFLLGHCAR

SEQ ID NO: 4785 - protein, 100 aa, Homo sapiens [sequence omitted]

SEQ ID NO: 4786 - protein, 337 aa, Homo sapiens
MGEGGGLFAFIAPSSLELGGTANAALRRESQGSLNSSASLDLGFLAFVSSKSESHRKSLGSTEGESESRPGKYCCVYLPDGTASLALARPGLTIRDMLAGICEKRGLSLPDIKVYLVGNEQKALVLDQDCTVLADQEVRLENRITFELELTALERVVRISAKPTKRLQEALQPILEKHGLSPLEVVLHRPGEKQPLDLGKLVSSVAAQRLVLDTLPGVKISKARDKSPCRSQGCPPRTQDKATHPPPASPSSLVKVPSSATGKRQTCDIEGLVELLNRVQSSGAHDQRGLLRKEDLVLPEFLQLPAQGPSSEETPPQTKSAAQPIGGSLNSTTDSAL

SEQ ID NO: 4787 - protein, 187 aa, Homo sapiens
MSPSSVALICLLRYGQLLEQSRHSWVNTTALITGCTNAAGLLVVGNFQVDHARSLHYVGAGVAFPAGLLFVCLHCALSYQGATAPLDLAVAYLRSVLAVIAFITLVLSGVFFVHESSQLQHGAALCEWVCVIDILIFYGTFSYEFGAVSSDTLVAALQPTPGRACKSSGSSSTSTHLNCAPESIAMI

SEQ ID NO: 4788 - protein, 525 aa, Homo sapiens
MEFGLSWVFLVVLLRGVQSQEELLESGGGVVQPGRSLRISCLASGFTFSSYGMHWVRQAPGKGLEWVAFISSDLRDKYPADSVKGRFFISRDNSKNILTLLMTGLRPEDTAIYYCAREFGFCGGRVCGSTYHHTMDVWGQGTTVIVSSASTKGPSVFPLAPCSRSTSGGTAALGCLVKDYFPEPVTVSWNSGALTSGVHTFPAVLQSSGLYSLSSVVTVPSSSLGTQTYTCNVNHKPSNTKVDKRVELKTPLGDTTHTCPRCPEPKSCDTPPPCPRCPEPKSCDTPPPCPRCPEPKSCDTPPPCPRCPAPELLGGPSVFLFPPKPKDTLMISRTPEVTCVVVDVSHEDPEVQFKWYVDGVEVHNAKTKPREEQFNSTFRVVSVLTVLHQDWLNGKEYKCKVSNKALPAPIEKTISKTKGQPREPQVYTLPPSREEMTKNQVSLTCLVKGFHPSDIAVEWESSGQPENNYNTTPPMLDSDGSFFLYSKLTVDKSRWQQGNIFPCSVMHEALHNRFTQKSLSLSPGK

SEQ ID NO: 4789 - protein, 108 aa, Homo sapiens
MESLSPRLEYSGMISAHCNLRLPGSSDSPASASRVAGIIGMYHHAWLIFVFLVEMGFHHVGQAGLELLTSSDPPTSPSQSVSIIGVSHCTQPDVPSFISAIPSSYLTT

SEQ ID NO: 4790 - protein, 636 aa, Homo sapiens [sequence omitted]

SEQ ID NO: 4791 - protein, 167 aa, Homo sapiens [sequence omitted]

SEQ ID NO: 4792 - protein, 122 aa, Homo sapiens
MESISCFTFYLFHFLQKQRDYILEGEPGKVSNLQYLHSYLTYIKLSTAIKRNENMAKGLQRALLQQQPEDDSKRSPRPQDLIRLYDIILQNLVELLQLPGLEEDKAFQKEIGLKTLVFKAYR

SEQ ID NO: 4793 - protein, 180 aa, Homo sapiens
MGLFMTEVMNQQVRVGIDGTEDGITGYFNQAHLVSQFIILFYFYYYFLRWSFALVIQAGVQWRYLSSLQPPPPGFKRFSCLSLPSSWDYRHAPSHLDNFFAFLVEMRFLHVGQAGLELPISGDPPALASQSAGIAGVSHRAWPVSGFILWEGRRTKKNTELCLKLLPSKSLRAADLNVFL

SEQ ID NO: 4794 - protein, 201 aa, Homo sapiens
MRRSPFVLHPVQMSTEGPIATPLPRSLKTSSPESCLTQSKCTSSPSQSCRTSLSLCETLARGERWVAGVVPGGGRDRLGGLTVFQLSSTAMEKKLIGCPVCIEHKKYSRNALLFNLGFVCDAQAKTCALEPIVKKLAGYLTTLEVCNEMGLGLPTGRVGEGVPMSPKSPKPGTLQTSSGLRAANQPGVLGCAHHAFHALSS

SEQ ID NO: 4795 - protein, 422 aa, Homo sapiens [sequence omitted]

SEQ ID NO: 4796 - protein, 120 aa, Homo sapiens
MQGTENSKSRMVLMRCEFTFPSVVEIAGPSAVQGPCCSLVLYCGWPLPKVTSWPRHFRPLSPCLPPGPARCKRGFEEGDPSRRLLLPLCMAQRLERSPCYGAPCFQRKASGVVTRKIRQT

SEQ ID NO: 4797 - protein, 550 aa, Homo sapiens
MLDPSSSEEESDEGLEEESRDVLVAAGSSQRAPPAPTREGRRDAPGRAGGGGAARSVSPSPSVLSEGRDEPQRQLDDEQERRIRLQLYVFVVRCIAYPFNAKQPTDMARRQQKLNKQQLQLLKERFQAFLNGETQIVADEAFCNAVRSYYEVFLKSDRVARMVQSGGCSANDFREVFKKNIEKRVRSLPEIDGLSKETVLSSWIAKYDAIYRGEEDLCKQPNRMALSAVSELILSKEQLYEMFQQILGIKKLEHQLLYNACQLDNADEQAAQIRRELDGRLQLADKMAKERKFPKFIAKDMENMYIEELRSSVNLLMANLESLPVSKGGPEFKLQKLKRSQNSAFLDIGDENEIQLSKSDVVLSFTLEIVIMEVQGLKSVAPNRIVYCTMEVEGEKLQTDQAEASRPQWGTQGDFTTTHPRPVVKVKLFTESTGVLALEDKELGRVILYPTSNSSKTAELHRMVVPKNSQDSDLKIKLAVRMDKPAHMKHSGYLYALGQKVWKRWKQRDSPGNSCPINGPLEHNGTESTHNALGLQMSKNLQRVLLKIQP

SEQ ID NO: 4798 - protein, 139 aa, Homo sapiens
MGKARMQSPTTTNYAVEFSTFGNITGVSTSGVQSMSPTLGKTTFVIMVSSLPGKAGELYFWPELLQKVSVRHQVGSCSDDIGPRGKKQKLHYWEKSSHSSQLQPSFSWWILEKPISFIFNFFYDSRGFTLHLVTNEYIT

SEQ ID NO: 4799 - protein, 478 aa, Homo sapiens [sequence omitted]

SEQ ID NO: 4800 - protein, 88 aa, Homo sapiens
MIARRNPEPLRFLPDEARSLPPPKLTDPRLLYIGFLGYCSGLIDNLIRRRPIATAGLHRQLLYITAFFFAGYYLVKREAYANLYVDTL

SEQ ID NO: 4801 - protein, 253 aa, Homo sapiens
MIQAIQVLRFHLLELEKVHELCDNFCHRYISCLKGKMPIDLVIDDREGGSKSDSEDITRSANLTDQPSWNRDHDDTASTRSGGTPGPSSGGHTSHSGDNSSEQGDGLDNSVASPSTGDDDDPDKDKKRHKKRGIFPKVATNIMRAWLFQHLTHPYPSEEQKKQLAQDTGLTILQVNNWFINARRRIVQPMIDQSNRAVSQGTPYNPDGQPMGGFVMDGQQHMGIRAPGPMSGMGMNMGPPCIRTFLDTLTTQQ

SEQ ID NO: 4802 - protein, 502 aa, Homo sapiens
MIISYEKIPSYRKSKSLTPHQRIHNTEKSYVCKECGKACSHGSKLVQHERTHTAEKHFECKECGKNYLSAYQLNVHQRFHTGEKPYECKECGKTFSWGSSLVKHERIHTGEKPYECKECGKAFSRGYHLTQHQKIHIGVKSYKCKECGKAFFWGSSLAKHEIIHTGEKPYKCKECGKAFSRGYQLTQHQKIHTGKKPYECKICGKAFCWGYQLTRHQIFHTGEKPYECKECGKAFNCGSSLIQHERIHTGEKPYECKECGKAFSRGYHLSQHQKIHTGEKPFECKECGKAFSWGSSLVKHERVHTGEKSHECKECGKTFCSGYQLTRHQVFHTGEKPYECKECGKAFNCGSSLVQHERIHTGEKPYECKECGKAFSRGYHLTQHQKIHTGEKPFKCKECGKAFSWGSSLVKHERVHTNEKSYECKDCGKAFGSGYQLSVHQRFHTGEKLYQRKEFGKTFTHGSKLVHERTHSNDKPYKYNECGEAFLWTTYSNEKIDTDETL

SEQ ID NO: 4803 - protein, 478 aa, Homo sapiens [sequence omitted]

SEQ ID NO: 4804 - protein, 129 aa, Homo sapiens [sequence omitted]

SEQ ID NO: 4805 - protein, 145 aa, Homo sapiens
MRLSHAQCLRRSPWYGRRIWSSIRSSWTGRRSSGSATPAICGSTPKPTRSSPTSCSSCCCASRRTWSPSPPSSSAPSTRGVRRHRPWAPPTGPTLSAPWSRRETPARGRPKRGPGPDRAGNQGSGWDAGGTRRGGCAFRAAVLGE

SEQ ID NO: 4806 - protein, 101 aa, Homo sapiens
MIQHLLSAASKQLSPPYCLLILPKIHYFLVRPNYTFFPELTTLVMLYSQLNAFCNIYYLSFWIQPQCHHLLESTPDSTGLRVRVAWEDHTCPLPSFRGGYK

SEQ ID NO: 4807 - protein, 407 aa, Homo sapiens
MDSPCQPQPLSQALPQLPGSSSEPLEPEPGRARMGVESYLPCPLLPSYHCPGVPSEASAGSGTPRATATSTTASPLRDGFGGQDGGELRPLQSEGAAALVTKGCQRLAAQGARPEAPKRKWAEDGGDAPSPSKRPWARQENQEAEREGGMSCSCSSGSGEASAGLMEEALPSAPERLALDYIVPCMRYYGICVKDSFLGAALGGRVLAEVEALKRGGRLRDGQLVSQRAIPPRSIRGDQIAWVEGHEPGCRSIGALMAHVDAVIRHCAGRLGSYVINGRTKAMVACYPGNGLGYVRHVDNPHGDGRCITCIYYLNQNWDVKVHGGLLQIFPEGRPVVANIEPLFDRLLIFWSDRRNPHEVKPAYATRYAITVWYFDAKERAAAKDKYQLASGQKGVQVPVSQPPTPT

SEQ ID NO: 4808 - protein, 460 aa, Homo sapiens
MNLTEDYMVFEDVAIHFSQEEWGILNDVQRHLHSDVMLENFALLSSVGCWHGAKDEEAPSKQCVSVGVSQVTTLKPALSTQKAQPCETCSSLLKDTLHLAEHDGTHPKRTAKLYLHQKEHLREKLTRSDEGRPSFVNDSVHLAKRNLTCMQGGKDFTGDSDLQQQALHSGWKPHRDTHGVEAFQSGQNNYSCTQCGKDFCHQHTLFEHQKIHTEERPYECSECGKLFRYNSDLIKHQRNHTGERPYKCSECGKAFSLKYNVVQHQKIHTGERPYECSECGKAFLRKSHLLQHQRIHTRPRPYVCSECGKAFLTQAHLVGHQKIHTGERPYGCNECGKYFMYSSALIRHQKVHTGERPFYCCECGKFFMDSCTLIIHQRVHTGEKPYECNECGKFFRYRSTLIRHQKVHTGEKPYECSECGKFFMDTSTLIIHQRVHTGEKPYECNKCGKFFRYCFTLNRH

SEQ ID NO: 4809 - protein, 105 aa, Homo sapiens
MIQPLPPLLSSLAKTALLSLHSSHWHFLITWGTLYSSCSQPLPMQVPSALSTAFLYFIYRLLSVRSQLKCHFLGEAGLHSRDLVRFPRQALLCHHVSIFHSTYLF

SEQ ID NO: 4810 - protein, 229 aa, Homo sapiens
MGAPCEQRCFNSYGTFLCRCHQGYELHRDGFSCSDIDECSYSSYLCQYRCVNEPGRFSCHCPQGYQLLATRLCQDIDECESGAHQCSEAQTCVNFHGGYRCVDTNRCVEPYIQVSENRCLCPASNPLCREQPSSIVHRYMTITSERSVPADVFQIQATSVYPGAYNAFQIRAGPRPAGDGPPGVRAGPGDGHHEFPHELPGQLCTEAHRLCRGLHLLRSRREPPSLHLP

SEQ ID NO: 4811 - protein, 587 aa, Homo sapiens
MNDSLFVSLDRLLLEFVFQYEQDISTKEEMIQRINKCCEDIKENKVTICRIHETINATDEEIDHYCKHSEEIKDNCRNWKPTCDVFRKHEDYMQDQFTVYQGTVEKDKEMYHDYICQYKEVLKQYQLKYSETPFSREYYEKKREHEEIQSRVLACTEQLKMNETIFMKFRVPAPFPSLTKWTLNIVNLRCETQDILKHASNLTKSSSELKKEVDEMEIEINYLNQQISRHNETKALSETLEEKNKNTENRKELKERIFGKDEHVLTLNKTQSSQLFLPYESQKLVRPIKMHSSEPRVADIKEESSVKQSKLANIDFRQKENDTQIFNDSAVDNHSKCSHITTITSSQKFMQVRLLTPQKQSNSNQWSEKGDKDAEYGDKGTVRQVRESKCTSQAIYTEHFGKSIENDSDEVEERAENFPRTSEIPIFLGTPKAVKAPESLEKIKFPKTPPFEINRNRNAVPEVQTEKESPGLSFLMSYTSRSPGLNLFDSSVFDTEISSDQFNEHYSARNLNPLSSEQEIGNLFEKPEGEDGFTFSFPSDTSTHTFGAGKDDFSFPFSFGQGQNSIPSSSLKGFSSSSQNTTQFTFF

SEQ ID NO: 4812 - protein, 476 aa, Homo sapiens
MEWPNHYACEKLLVLLTHYDMIERKLGSRNSNQLQPIRIVKTRIRNGVHCFEIEWEKPEHYAMEDKQHGEFALLTIEEESLFEAAYPEIVAVYQKQKLEIKGKKQKRIKPKENNLPEPDEVMSFQSHMTLKPTCEIFHKQNSKLNSGISPDPTLPQESISASLNSLLLPKNTPCLNAQEQFMSSLRPLAIQQIKAVSKSLISESSQPNTSSHNISVIADLHLSTIDWEGTSFSNSPAIQRNTFSHDLKSEVESELSAIPDGFENIPEQLSCESERYTANIKKVLDEDSDGISPEEHLLSGITDLCLQDLPLKERIFIKLSYPQDNLQPDVNLKTLSILSVKESCIANSGSDCTSHLSKDLPGIPLQNESRDSKILKGDQLLQEDYKVNTSVPYSVSNTVVKTCNVRPPNTALDHSRKVDMQTTRKILMKKSVCLDRHSSDEQSAPVFGKAKYTTQRMKHSSQKHNSSHFKESGHNE

SEQ ID NO: 4813 - protein, 380 aa, Homo sapiens
MDSKKKALTWPGQGVYYDFPRGVEKNKPVFYPKPPKTFAPNTSLNSWDPICSAKEANIQRNLERSHWLTSYTHDFTGLGPMDPLELDDYHEKMVAELTRKIGFDPEPQEKFHPVFKPPRPLEGRIARLIQNRRSLEAIVQQRPRSCPDCTPRVLCNFHTFVPSSKEMVALSDNIPAGVTHKNQDIEEKIIEEQSLLSTYELPSCYPTKDLTSIYDIKPFPKITDTKKTEDLYWRQQSLKTQPTPYCKPDHWIHYENLKSPLRDQYNMCPDPVSLSKPSVLQNKQDTEAFTLEHFLSKPEEELFLNMENNEETRPVLGWIPRAGVTKPQTNLLELKNSFSKTGAQKRFHKSILEDHKDLRDNEHSGMKHQFYGHNSYYFYN

SEQ ID NO: 4814 - protein, 418 aa, Homo sapiens
MEGESKQLLCDVMIVAEDVEIEAHRVVLAACSPYFCAMFTGDMSESKAKKIEIKDVDGQTLSKLIDYIYTAEIEVTEENVQVLLPAASLLQLMDVRQNCCDFLQSQLHPTNCLGIRAFADVHTCTDLLQQANAYAEQHFPEVMLGEEFLSLSLDQVCSLISSDKLTVSSEEKVFEAVISWINYEKETRLEHMAKLMEHVRLPLLPRDYLVQTVEEEALIKNNNTCKDFLIEAMKYHLLPLDQRLLIKNPRTKPRTPVSLPKVMIVVGGQAPKAIRSVECYDFEEDRWDQIAELPSRRCRAGVVFMAGHVYAVGGFNGSLRVRTVDVYDGVKDQWTSIASMQERRSTLGAAVLNDLLYAVGGFDGSTGLASVEAYSYKTNEWFFAAPMNTRRSSVGVGVVEVEVEVAVSRDRAIALQPR

SEQ ID NO: 4815 - protein, 252 aa, Homo sapiens [sequence omitted]

SEQ ID NO: 4816 - protein, 179 aa, Homo sapiens
MMMSDNAKGRAAHSWKKRGSISSLSNHEFWRKEIHGRIKDSMSTVSYMEEPSQRDDISRLTVQMENTYQLGPPKHFPVVTVNHILKDVVTSYLQVEEYEPELCRQMTKTISEVIKAQVKDLMIPRYKLIVIVHIGQLNRQSIIIGSRCLWDPKSDTFSSYVFRNSSLFALANVYAVYLE

SEQ ID NO: 4817 - protein, 617 aa, Homo sapiens
MTANHESYLLMASTQNDMEDWVKSIRRVIWGPFGGGIFGQKLEDTVRYEKRYGNRLAPMLVEQCVDFIRQRGLKEEGLFRLPGQANLVKELQDAFDCGEKPSFDSNTDVHTVASLLKLYLRELPEPVIPYAKYEDFLSCAKLLSKEEEAGVKELAKQVKSLPVVNYNLLKYICRFLDEVQSYSGVNKMSVQNLATVFGPNILRPKVEDPLTIMEGTVVVQQLMSVMISKHDCLFPKDAELQSKPQDGVSNNNEIQKKATMGQLQNKENNNTKDSPSRQCSWDKSESPQRSSMNNGSPTALSGSKTNSPKNSVHKLDVSRSPPLMVKKNPAFNKGSGIVTNGSFSSSNAEGLEKTQTTPNGSLQARRSSSLKVSGTKMGTHSVQNGTVRMGILNSDTLGNPTNVRNMSWLPNGYVTLRDNKQKEQAGELGQHNRLSTYDNVHQQFSMMNLDDKQSIDSATWSTSSCEISLPENSNSCRSSTTTCPEQDFFGGNFEDPVLDGPPQDDLSHPRDYESKSDHRSVGGRSSRATSSSDNSETFVGNSSSNHSALHSLVSSLKQEMTKQKIEYESRIKSLEQRNLTLETEMMSLHDELDQERKKFTMIEIKMRNAERAKEDAE

SEQ ID NO: 4818 - protein, 370 aa, Homo sapiens [sequence omitted]

SEQ ID NO: 4819 - protein, 171 aa, Homo sapiens
MEERGDSEPTPGCSGLGPGGVRGFGDGGGAPSWAPEDAWMGTHPKYLEMMELDIGDATQVYVAFLVYLDLMESKSWHEVNCVGLPELQLICLVGTEIEGEGLQTVVPTPITASLSHNRIREILKASRKLQGDPDLPMSFTLAIVESDSTIVYYKLTDGFMLPDPQNISLRR

SEQ ID NO: 4820 - protein, 112 aa, Homo sapiens
MRGCGSSRLCRSWRGSRSLRGSSHLSQWLNNFFALPFSSMASQLDMSSVVGAGEGRAQTLGAVVPPGDSVRGSMEASQVQVPLEASPITFPPPCAPERPPISPVPGARQAGL

SEQ ID NO: 4821 - protein, 115 aa, Homo sapiens
MVARRTKLAARDPEDGIPSPPCYAAIPIKFSEKQQASHYLYVRAHGIQQGTKSTWPQKRTLFVFNVPPYCTEQESLSCLQSTCGLVQSVELKEKLELAGSQGRSFFIQSQFRVSR

SEQ ID NO: 4822 - protein, 101 aa, Homo sapiens [sequence omitted]

SEQ ID NO: 4823 - protein, 149 aa, Homo sapiens
MGFFDFFKYKYQVNVDGTVAAYRYPYLMLGDSLVLKQDSPYYEHFYMALEPWKHYVPIKRNLSDLLEKVKWAKENDEEAKKIAKEGQLMARDLLQPHRLYCYYYQVLQKYAERQSSKPEVRDGMELVPQPEDSTAICQCHRKKPSREEL

SEQ ID NO: 4824 - protein, 125 aa, Homo sapiens
MDAELLGRELRLFLFSPQEKNSFSDVFVVGEYFCHCFEKTSPPNSPSFLGISFLKWKAFNIHSKLALLLPQGKITSKQRCLPSVSGGASLRGLSSRINSTAGPVSSSYPSPSSIFGKGSLKSESL

SEQ ID NO: 4825 - protein, 165 aa, Homo sapiens
MFYLRQPASAKWYDRRDYVFIEFCVEDSKDVNVNFEKSKLTFSCLGGSDNFKHLNEIDLFHCIDPNDSKHKRTDRSILCCLRKGESGQSWPRLTKERAKLNWLSVDFNNWKDWEDDSDEDMSNFDRFSEMMNNMGGDEDVDLPEVDGADDVSLKILFSVYFHTIK

SEQ ID NO: 4826 - protein, 517 aa, Homo sapiens [sequence omitted]

SEQ ID NO: 4827 - protein, 105 aa, Homo sapiens
MEEAASSLLVSLTQWLPEDTQSGWRLWLKGHRNTAIRKCQETSQKDGQPCPLIFPLVYFWAFLQTLQLNKMLKSDGRFVDTCNRYEVSEPSVLQIHKFLLHQRRQ

SEQ ID NO: 4828 - protein, 894 aa, Homo sapiens [sequence omitted]

SEQ ID NO: 4829 - protein, 236 aa, Homo sapiens
MIFRVSAEGSQACAKGCELCSEVNGCLKCSPKLFILLERNDIRQVGVCLPSCPPGYFDARNPDMNKCIKCKIEHCEACFSHNFCTKCKEGLYLHKGRCYPACPEGSSAANGTMECSSPAQCEVSEWSPWGPCSKKQQLCGFRRGSEERTRRVLHAPVGDHAACSDTKETRRCTVRRVPCPEGQKRRKGGQGRRENANRNLARKESKEAGAGSRRRKGQQQQQQQGTVGPLTSAGPA

SEQ ID NO: 4830 - protein, 101 aa, Homo sapiens
METRRRGLATPQTQGPLAPGSGRVFWPEAPTFLTRAPFRLLFRTVKKELSTPAPTLPWPGWRNCASIPRRNSPLCCWGGTVCVPCGGPCEQAHLAPDPPPT

SEQ ID NO: 4831 - protein, 579 aa, Homo sapiens
MDDSKQESTTSKEEETNIISSIVPSTQDIYQRQNSSDLHKSLLPAVDETTCGHTHFQQMIDKYINEANLIPEKTDLQELEHIFPNLHHQLFKSLEPHPDFDLSSSSSGISPDNRDFYQRSDSSSESHCATGLSKSTVYFTALRRTSMHSSLNTSPNQQPDTNLAHVGAHSFATENIIGGSEQCFEQLQPEYSSQEESQHADLPSIFSIEARDSSQGMKNQNYPSEEHTEILQNKKKIVHFQLSIGNLSSVYSSSDEANVFDQLNVQHSTPCGSNSSECSTKHQLESRKEGMGFEELSKRGVVTMLRSQGLIEDNKNETCRVLDINPQVEETDSRLCVRTVEMGTSIQAPYSLTTQNEKYFENSAETDIPKITKKLSQLGESELFASSGSFSLQSSIPVWETETGHGIMEEPELTLISTTDTSIAEMDFANLTLEEKSENEAKCFFQVSVFLPLVSATEASDYPAVSELSIEKPRTASTAETPRRLTPVPGSLQEAFIKRKKSFMERSHQRQKEIRNKIHVSENSQIKTVKEKPSISSSVSRLKGVNKVRASFPEDRKTTQALRHQRGLRLYNQLAEVKQ

SEQ ID NO: 4832 - protein, 195 aa, Homo sapiens
MLKTLNKLGIEGPCLKIIRAICDKRTANIILNGQQLEAFPLKTGTRQGCPLSPLLFNIVLEVLARAIRQVKEIKGIQIGREEVNLSLLADDMILYLENPVVSAQRPLKLINNFSKVSGYRINVQKSLAFLYTSNSKADSQISNELPFTIATKRIKYLGIQLTREVKDLYKENYKPPLKEIGDDTQKNGKTFQAHG

SEQ ID NO: 4833 - protein, 557 aa, Homo sapiens [sequence omitted]

SEQ ID NO: 4834 - protein, 259 aa, Homo sapiens
MDRSAEFRKWKAQCLSKADLSRKGSVDEDVVELVQFLNMRDQFFTTSSCAGRILLLDRGINGFEVQKQNCCWLLVTHKLCVKDDVIVALKKANGDATLKFEPFVLHVQCRQLQDAQILHSMAIDSGFRNSGITVGKRGKTMLAVRSTHGLEVPLSHKGKLMVTEEYIDFLLNVANQKMEENKKRIERFYNCLQHALERETMTNLHPKIKEKNNSSYIHKKKRNPEKTRAQCITKESDEELENDDDDDLGINVTIFPEDY

SEQ ID NO: 4835 - protein, 139 aa, Homo sapiens
MGQNWKRQQKLWNVPQLPFIRVPPSIYDTSLLKALNQGQQRYFYSIMRIYNSRPQWEALQTRYIHSLQHQQLLGYITQREALSYALVLRDSTKRASAKVAPQRTIPRKTSAMTRRCPSVLPVSVVLPRAQSKRRQVLRN

SEQ ID NO: 4836 - protein, 216 aa, Homo sapiens
MPRQVPAHILWTPSSFSLGFDALCESSALPFPCYRHLPCSVPPNSFRTEQFRKGKGRGGGEEGRVGPWKVLHGRLPFFFLRWSLAVSPSLECSGMISAHCKLRLLGSGDSSASASRVAGTTGACHCALLIFVFLVETGFHHIGQAGLELLTSWSTRLSLPKCWDYRCKPPRLARETDILSQHSWKRLLEHQDKELSCIQGPCGVRIPIFLSFLFFF

SEQ ID NO: 4837 - protein, 131 aa, Homo sapiens
MLPVSLLKHNKGHLYFSSQQGLHLHLRPPQPGPYCSYHYQYFCQCHSQSLGGSKLSYIFLSSSEPSRLFQHPVPKLLPHFRVSFQQCPTLLVLLVHFHAADKDIPETGNKKRFNWTYSSTWLGRPQNHGRR

SEQ ID NO: 4838 - protein, 108 aa, Homo sapiens [sequence omitted]

SEQ ID NO: 4839 - protein, 584 aa, Homo sapiens
MKQPSSGTPVSSGFRDSSQIKSYSRTQTSSETQVHTAAQSRSQPQLHPSAHPHPAAQSSSSDDSSSETEPSSRTSPSATTRPNSRIQTSSGTPSILEARPSSSTQLGAKPHSPCTMQLSSRMQFTSRTQTNFKAWPSSRAQSSPSTAPSSGTQLSSGAQAGSEIPASSKTQTAAETQPSSRIQLSSGVQSSPGTQAIAAIELSSTALSSSDSRSSSRTQRCPGARPASGTQFASKTLPGSRYQLQTTAPDSSGIQLDFGKQSSSESQLSFGTQPSSGTQISSRIQASSGSQLSSGTQLISGAQPSSRTQTSSGNQLSSGTQTTARIQLSPGAHLSSRTQSSPETRLSSEAQSSSGTQFSSGIQFGSETQTGSRIQPDSGAQLSSRTQSSSETGLSSETQTGSRIQPSPGAHLSSGTQPVSGTQSSSRTHTSSRIWLSPGNGICPQTPGLDPRIQLEAPAPAQPQPPGPSPRDPTPAPSKDPQPLPQPHDQVCGIQASLGPIPGLPQASYLAPQSQVSSTPQKPAVSPKPRVGPQKSTPPTISVTPSPAPRAALLSSQLSESPALAPALCPTLGEPGARPYRGGP

SEQ ID NO: 4840 - protein, 686 aa, Homo sapiens [sequence omitted]

SEQ ID NO: 4841 - protein, 103 aa, Homo sapiens [sequence omitted]

SEQ ID NO: 4842 - protein, 124 aa, Homo sapiens [sequence omitted]

SEQ ID NO: 4843 - protein, 115 aa, Homo sapiens
MSESGCGRLRHPRRTRASGRTSSRSELEDSRSMTESPSLPSLSSSACVSVARKLQFFPLEATKVRKVLQMGLREARLKLPHWLEWAALEGDVGIHSKGRGILSKSISPAYKGGWL

SEQ ID NO: 4844 - protein, 152 aa, Homo sapiens [sequence omitted]

SEQ ID NO: 4845 - protein, 142 aa, Homo sapiens
MLSREHQLIQPKVAWISIWVSQAIGSAIELLRDYVFCLNSEFLFFGCLMEFAVASHFLQRFCEILWLSCCVPVVVFGAKVHDVSFYMLFCPSEWELQVSPASSPPFFPIFSFLMLPQFYTTLFSIPQSHPAEALASNSMEKN

SEQ ID NO: 4846 - protein, 133 aa, Homo sapiens
MLCHTLHIYKVSLQYEFSYVYSGMWTIQRLCHTLHIRKVSLQYELSYVYSGLWNIKRLCHTLHIYKVSLQYEFSYVYSGMQTIQRLCHTLHICKVSLQYELSYVYSGLWTIQRLCHTLHICGASLQYEFSYVH

SEQ ID NO: 4847 - protein, 275 aa, Homo sapiens
MQPPGPRDPLIRLCFFREEGTNVVQKICFSTQIIRHFESKLSDTIEVYQERIQWLTENSKKAFGLIKGARVSILIDVSAISSGPQKEEFQKDLMSLIDEQLSHKEKLFVLSFGTNAGSLWPDPMEVSASTLQELKLWVKTLQPDGGSNLLQALKKIFTLKGLDSLVAIMRSCPDQPSEILSDYIQQSTTGRDLIIHFITYRCDDQMPPAVLKNLAEAVRGYYHCYSPKMEHYTSRDMDELLAEIQKAQSLLSHVQALQHSSPCEALTCTMEEPRN

SEQ ID NO: 4848 - protein, 169 aa, Homo sapiens
MVGFGANRRAGRLPSLVLVVLLVVIVVLAFNYWSISSRHVLLQEEVAELQGQVQRTEVARGRLEKRNSDLLLLVDTHKKQIDQKEADYGRLSSRLQAREGLGKRCEDDKSLALWPRLKCSGTISAHCKLCLPGSRHSPASASRIAGTTGAYHHAWLIFCIFSRDGVSQC

SEQ ID NO: 4849 - protein, 113 aa, Homo sapiens
MEEKYGEVEEMNVCDNLGDHLVGNVYVKVGARARRRRGRLVCRGQGQQAKARQWCSRLVCRGQGRQRMGCLSPCTLRSWMLRRTAGLRCTGSAPTGCVICGGGQPTRAPSQQN

SEQ ID NO: 4850 - protein, 239 aa, Homo sapiens [sequence omitted]

SEQ ID NO: 4851 - protein, 175 aa, Homo sapiens [sequence omitted]

SEQ ID NO: 4852 - protein, 181 aa, Homo sapiens
MAQVAVSTLPVEEESSSETRMVVTFLVSALESMCKELAKSKAEVACIAVYETDVFVVGTERGCAFVNARTDFQKDFAKYCVAEGLCEVKPPCPVNGMQVHSGETEILRKAVEDYFCFCYGKALGTTVMVPVPYEKMLRDQSAVVVQGLPEGVAFQHPENYDLATLKWILENKAGISFIINR

SEQ ID NO: 4853 - protein, 130 aa, Homo sapiens
MIQPVPRLTSLHVTSAMSPPCSRAGRDSPGLPPHVQAPLATPGSCHSSSPAPHSCQPLHLPACPPPFPGTHPEMEPPFLPTRSRQPSRGPPIPPSCGSAPRATVLVLLPWRARDVGPARHYSERCFPDSL

SEQ ID NO: 4854 - protein, 141 aa, Homo sapiens [sequence omitted]

SEQ ID NO: 4855 - protein, 154 aa, Homo sapiens [sequence omitted]

SEQ ID NO: 4856 - protein, 455 aa, Homo sapiens
MFTEGEEMYLQGSTVWHPDCKQSTKTEEKLRLPNIRRSSSDFFYSKSLIRRTGRSPSLQPTRTSSESIYSRPGSSIPGSPGHTIYAKVDNEILDYKDLAAIPKVKAIYDIERPDLITYEPFYTSGYDDKQERQSLGESPRTLSPTPSAEGYQDVRDRMIHRSTSQGSINSPVYSRHSYTPTTSRSPQHFHRPDQGINIYRKPPIYKQHAALAAQSKSSEDIIKFSKFPAAQAPDPSETPKIETDHWPGPPSFAVVGPDMKRRSSGREEDDEELLRRRQLQEEQLMKLNSGLGQLILKEEMEKESRERSSLLASRYDSPINSASHIPSSKTASLPGYGRNGLHRPVSTDFAQYNSYGDVSGGVRDYQTLPDGHMPAMRMDRGVSMPNMLEPKIFPYEMLMVTNRGRNKILREVDRTRLERHLAPEVFREIFGMSIQEFDRLPLWRRNDMKKKAKLF

SEQ ID NO: 4857 - protein, 132 aa, Homo sapiens [sequence omitted]

SEQ ID NO: 4858 - protein, 106 aa, Homo sapiens
MDWKCSRLGSHAALRNHWESVQGPPQRPFSVFPVRRRKPGSAILSSSGVCYGSHLSSKGRGGPEDPPHCQSCGRGGCPSSHHCPPDCATSQALTELLYKPRDNQMQ

SEQ ID NO: 4859 - protein, 414 aa, Homo sapiens
MPSLLYPPLLCISHSEYNSCHCGFGLPFYVQFLFPYLGSGERESPERKLLQGPMDISEKLFCSTCDQTFQNHQEQREHYKLDWHRFNLKQRLKDKPLLSALDFEKQSSTGDLSSISGSEDSDSASEEDLQTLDRERATFEKLSRPPGFYPHRVLFQNAQGQFLYAYRCVLGPHQDPPEEAELLLQNLQSRGPRDCVVLMAAAGHFAGAIFQGREVVTHKTFHRYTVRAKRGTAQGLRDARGGPSHSAGANLRRYNEATLYKDVRDLLAGPSWAKALEEAGTILLRAPRSGRSLFFGGKGAPLQRGDPRLWDIPLATRRPTFQELQRVLHKLTTLHVYEEDPREAVRLHSPQTHWKTVREERKKPTEEEIRKICRDEKEALGQNEESPKQGLITIWQLSDLSFCPKNALANSLLS

SEQ ID NO: 4860 - protein, 169 aa, Homo sapiens [sequence omitted]

SEQ ID NO: 4861 - protein, 332 aa, Homo sapiens
MTPVPASLRWHSHLPTLGCPLSGTTQNAQSWGQTTLSRTLIQESSLLIFPSVTLLPLVSDPTVCAEPRMKPEQRLGSAPFIPLEPGGACWLPCSFLPEQSASSPSSASVGYRPGAGGPTPPPARSVAGPRPAAQELCHPPGRDDMLDVETDAYIHCVSAFVKLAQSEYQLLADIIPEHHQKKTFDSLIQDALDGLMLEGENIVSAARKAIVRHDFSTVLTVFPILRHLKQTKPEFDQVLQGTAASTKNKLPGLITSMETIGAKALEDFADNIKVPAVLPFLPPSRPSTTVTWPWGTLRAGLQEGALSRGSQLRHWPVSTHVPSFPSWGLQAL

SEQ ID NO: 4862 - protein, 121 aa, Homo sapiens
MVSAQQGVFTCARRPGSDADGLHRGRRRGLGFALRFSLPCAPTSGRPPLTSCPLPLCTWQWVNGTACAASGFSRAADPAWAPTTGRVGMNVFRNVSFPLPFQSYLERGDVNHWMGNQELLY

SEQ ID NO: 4863 - protein, 173 aa, Homo sapiens [sequence omitted]

SEQ ID NO: 4864 - protein, 139 aa, Homo sapiens
MLLATLSSEMTLCPSRPVVGELVRKHTWALPTRHPSPGVGYPHGCRHPLARPGCSFSLSLLVSSPLPAFSALSSCFLLFSPGLLPCPQTFFFPRIWAHSKERVAFGHKALDPTMEDWGVPDAPQKEACRDSTWESPMAL

SEQ ID NO: 4865 - protein, 429 aa, Homo sapiens
MDSNGIRQFCVHVNNSNLNYFQKLQKVNATNFQALAAEFGGESFTSTFQTQSPPSFYRAGDPILTYFPKWSVISLLRQPAGVGAGGLCAESNPAGFLESKSTTCTRFFKNLASSCTLDSALNAASYYNFTVLKVPRSMTDPQNMEVTYEIETNGTFGIQKVSVSLGQTNLTVEPGASLQQHFILRFRAFQQSTAASLTSPRSGNPGYIVGKPLLALTDDISYSMTLLQSQGNGSCSVKRHEVQFGVNAISGCKLRLKKADCSHLQQEIYQTLHGRPRPEYVAIFGNADPAQKGGWTRILNRHCSISAINCTSCCLIPVSLEIQVLWAYVGLLSNPQAHVSGVRFLYQCQSIQDSQQVTEVSLTTLVNFVDITQKPQPPRGQPKMDWKWPFDFFPFKVAFSRGVFSQKCSVSPILILCLLLLGVLNLETM

SEQ ID NO: 4866 - protein, 100 aa, Homo sapiens
MAARLPPALPSVLPRGHVLLRAGFTCAVWPDGPAPRSSAHPAAMGHPSPDLFPQGHCGPPSCPRGISASLSQVHTWGAAKDFCRKIHSRGQQLEAQMESE

SEQ ID NO: 4867 - protein, 305 aa, Homo sapiens
MLDKAPMLKVIVNSLKNMINTFVPSGKVMQVVDEKLPGLLGNFPGPFEEEMKGIAAVTDIPLGHLIHGRNMDFGVFLGWNINNDTWVITEQLKPLTVNLDFQRNNKTVFKASSFAGYVGMLTGFKPGLFSLTLNERFSINGGYLGILEWILGKKDAMWIGFLTRTVLENSTSYEEAKNLLTKTKILAPAYFILGGNQSGEGCVITRDRKESLDVYELDAKQGRWYVVQTNYDRWKHPFFLDDRRTPAKMCLNRTSQENISFETMYDVLSTKPVLNKLTVYTTLIDVTKGQFETYLRDCPDPCIGW

SEQ ID NO: 4868 - protein, 673 aa, Homo sapiens
MMFQDSVAFEDVAVTFTQEEWALLDPSQKNLCRDVMQETFRNLASIGKKWKPQNIYVEYENLRRNLRIVGERLFESKEGHQHGEILTQVPDDMLKKTTTGVKSCESSVYGEVGSAHSSLNRHIRDDTGHKAYEYQEYGQKPYKCKYCKKPFNCLSSVQTHERAHSGRKLYVCEECGKTFISHSNLQRHRIMHRGDGPYKCKFCGKALMFLSLYLIHKRTHTGEKPYQCKQCGKAFSHSSSLRIHERTHTGEKPYKCNECGKAFHSSTCLHAHKRTHTGEKPYECKQCGKAFSSSHSFQIHERTHTGEKPYECKECGKAFKCPSSVRRHERTHSRKKPYECKHCGKVLSYLTSFQNHLGMHTGEISHKCKICGKAFYSPSSLQTHEKTHTGEKPYKCNQCGKAFNSSSSFRYHERTHTGEKPYECKQCGKAFRSASLLQTHGRTHTGEKPYACKECGKPFSNFSFFQIHERMHREEKPYECKGYGKTFSLPSLFHRHERTHTGGKTYECKQCGRSFNCSSSFRYHGRTHTGEKPYECKQCGKAFRSASQLQIHGRTHTGEKPYECKQCGKAFGSASHLQMHGRTHTGEKPYECKQCGKSFGCASRLQMHGRTHTGEKPYKCKQCGKAFGCPSNLRRHGRTHTGEKPYKCNQCGKVFRCSSQLQVHGRAHCIDTP

SEQ ID NO: 4869 - protein, 488 aa, Homo sapiens
MTVKTAPRSPDARASYGHSQTDSVPGPAVAASKENLPVLNTRIICPGLRAGLAASIAGSSIINKMLLANIDPFGATPFIDPDLDSVDGYSEKCVMNNYFGIGLDAKISLEFNNKREEHPEKCRSRTKNLMWYGVLGTRELLQRSYKNLEQRVQLECDGQYIPLPSLQGIAVLNIPSYAGGTNFWGGTKEDDIFAAPSFDDKILEVVAIFDSMQMAVSRVIKLQHHRIAQCRTVKITIFGDEGVPVQVDGEAWVQPPGIIKIVHKNRAQMLTRDRAFESTLKSWEDKQKCDSGKPVLRTHLYIHHAIDLATEEVSQMQLCSQAAEELITRICDAATIHCLLEQELAHAVNACSHALNKANPRCPESLTRDTATEIAINVKALYNETESLLVGRVPLQLESPHEERVSNALHSVEVELQKLTEIPWLYYILHPNEDEEPPMDCTKRNNRSTVFRIVPKFKKEKVQKQKTSSQPGSGDTESGSCEANSPGN

SEQ ID NO: 4870 - protein, 173 aa, Homo sapiens [sequence omitted]

SEQ ID NO: 4871 - protein, 150 aa, Homo sapiens [sequence omitted]

SEQ ID NO: 4872 - protein, 253 aa, Homo sapiens
MAASLHGFSSSEDALEYYKPSTTLDGTNKLCQFSPVQELSEQTPETSPDKEEASIPKKLQTARPSDSQSKRLHSVRTSSSGTAQRSLLSPLHRSGSVEDNYHTSFLFGLSISQQHLTKSAGLGLKGWHSDILAPQTSTPSLTSSWYFATESSHFYSASAIYGGSASYSAYSCSQLPTCGDQVYSVRRRQKPSDRADSRRSWHEESPFEKQFKRRSCQMEFGESIMSENRSREELGKVGSQSSFSGSMEIIEVS

SEQ ID NO: 4873 - protein, 114 aa, Homo sapiens
MLFWGVSILVISFILSFFVLCVPQILVFLRVIGGLLALAAVFQIISLVIYPVKYTQPSTFMPSPAVTSIYNWAYGFGWAAMIILIGCAFFCCCLPSCEDDPLGNTKPRYFYTSA

SEQ ID NO: 4874 - protein, 385 aa, Homo sapiens [sequence omitted]

SEQ ID NO: 4875 - protein, 304 aa, Homo sapiens
MLPPPAVMNYIFLLLCLCGLVGNGLVLWFFGFSIKRNPFSIYFLHLASADVGYLFSKAVFSILNTGGFLGTFADYIRSVCRVLGLCMFLTGVSLLPAVSAERCASVIFPAWYWRRRPKRLSAVVCALLWVLSLLVTCLHNYFCVFLGRGAPGAACRHMDIFLGILLFLLCCPLMVLPCLALILHVECRARRRQRSAKLNHVILAMVSVFLVSSIYLGIDWFLFWVFQIPAPFPEYVTDLCICINSSAKPIVYFLAGRDKSQRLWEPLRVVFQRALRDGAELGEAGGSTPNTVTMEMQCPPGNAS

SEQ ID NO: 4876 - protein, 278 aa, Homo sapiens
MAALYACTKCHQRFPFEALSQGQQLCKECRIAHPVVKCTYCRTEYQQESKTNTICKKCAQNVQLYGTPKPCQYCNIIAAFIGNKCQRCTNSEKKYGPPYSCEQCKQQCAFDRKDDRKKVDGKLLCWLCTLSYKRVLQKTKEQRKHLSSSSRAGHQEKEQYSRLSGGGHYNSFSPDLALDSPGTDHFVIIAQLKEEVATLKKMLHQKDQMILEKEKKITELKADFQYQESQMRAKMNQMEKTHKEVTEQLQAKNRELLKQAAALSKSKKSEKSGAITSP

SEQ ID NO: 4877 - protein, 231 aa, Homo sapiens
MIILLTRKEDLGDQDLDTFLRNSNKALYGLIQKCKNRYSAFNYRATGEEEQRQADELLEKIESMVHQNGNKHCVFREKETLNIVLVGRSGTGKSATGNSILGSLVFTSRLRAQPVTKTSQSGRRTWDGQEVVVVDTPSFNQMLDVEKDPSRLEEEVKRCLSCCEKGDTFFVLVFQLGRFTEEDKTAVAKLEAIFGADFTKYAIMLFTRKEDLGAGNLEDFMKNSDILFFTR

SEQ ID NO: 4878 - protein, 385 aa, Homo sapiens [sequence omitted]

SEQ ID NO: 4879 - protein, 418 aa, Homo sapiens
MCHSMLGPFKFGSNVNFVVGNNGSWSAVVRSRLNATSASQVQAILLFQPCGKSAVLTALIVGLGGRAVATNRGSSLKGFVKDGQNSADISITLRNRGDDAFKASVYGNSILIQQHISIDGSRSYKLKSATGSVVSTRKEELIAILDHFNIQVDNPVSVLTQEMSKQFLQSKNEGDKYKFFMKATQLEQMKEDYSYIMETKERTKEQIHQGEERLTELKRQCVEKEERFQSIAGLSTMKTNLESLKHEMAWAVVNEIEKQLNAIRDNIKIGEDRAARLDRKMEEQQVRLNEAEQKYKDIQDKLEKISEETNARAPECMALKADVVAKKRAYNEAEVLYNRSLNEYKALKKDDEQLCKRIEELKKSTDQSLEPERLERQKKNILVKRESKGLSKSRKFSQSRDRTVSASHRKGQRRTWQN

SEQ ID NO: 4880 - protein, 116 aa, Homo sapiens
MSVWSLGSHQTFLIKGTQDCGHASWDISSLVPLASESQTVNDFSLLKRVACGLFQKVKKKTLQFPPVGNLVTVIPVLCSLLYFFTLLFFSLWDFIRALYSLGCDVVKFNPVIDYIE

SEQ ID NO: 4881 - protein, 735 aa, Homo sapiens
MEDAGGGEETPAPEAPHPPQLAPPEEQGLLFQEETIDLGGDEFGSEENETASEGSSPLADKLNEHMMESVLISDSPNSEGDAGDLGRVRDEAEPGGEGDPGPEPAGTPSPSGEADGDCAPEDAAPSSGGAPRQDAAREVPGSEAARPEQEPPVAEPVPVCTIFSQRAPPASGDGFEPQMVKSPSFGGASEASARTPPQVVQPSPSLSTFFGDTAASHSLASDFFDSFTTSAFISVSNPGAGSPAPASPPPLAVPGTEGRPEPVAMRGPQAAAPPASPEPFAHIQAVFAGSDDPFATALSMSEMDRRNDAWLPGEATRGVLRAVATQQRGAVFVDKENLTMPGLRFDNIQGDAVKDLMLRFLGEKAAAKRQVLNADSVEQSFVGLKQLISCRNWRAAVDLCGRLLTAHGQGYGKSGLLTSHTTDSLQLWFVRLALLVKLGLFQNAEMEFEPFGNLDQPDLYYEYYPHVYPGRRGSMVPFSMRILHAELQQYLGNPQESLDRLHKVKTVCSKILANLEQGLAEDGGMSSVTQEGRQASIRLWRSRLGRVMYSMANCLLLMKDYVLAVEAYHSVIKYYPEQEPQLLSGIGRISLQIGDIKTAEKYFQDVEKVTQKLDGLQGKIMVLMNSAFLHLGQNNFAEAHRFFTEILRMDPRNAVANNNAAVCLLYLGKLKDSLRQLEAMVQQDPRHYLHESVLFNLTTMYELESSRSMQKKQALLEAVAGKEGDSFNTQCLKLA

SEQ ID NO: 4882 - protein, 179 aa, Homo sapiens
MCACGHPFPAPPRLPMTLCFFRRVLGPGSPVPGPTPPPHAALCPQVLAEERTERTARGLLLRRLRRRDSGVYLCAAVEQGFTQPLRRLSLHVLSATQAERLARAEEAAPAAPPGPKLWYRDFLQLVEPGGGGSANSLRMCRPQPALQSLPLESRRKGRNRRTHAPEPRAERGPRSATHW

SEQ ID NO: 4883 - protein, 600 aa, Homo sapiens
MDFTAQPKPATALCGVVSADGKIAYPPGVKEITDKITTDEMIKRLKMVVKTFMDMDQDSEDEKQQYLPLALHLASEFFLRNPNKDVRLLVACCLADIFRIYAPEAPYTSHDKLKDIFLFITRQLKGLEDTKSPQFNRYFYLLENLAWVKSYNICFELEDCNEIFIQLFRTLFSVINNSHNKKVQMHMLDLMSSIIMEGDGVTQELLDSILINLIPAHKNLNKQSFDLAKVLLKRTVQTIEACIANFFNQVLVLGRSSVSDLSEHVFDLIQELFAIDPHLLLSVMPQLEFKLKSNDGEERLAVVRLLAKLFGSKDSDLATQNRPLWQCFLGRFNDIHVPVRLESVKFASHCLMNHPDLAKDLTEYLKVRSHDPEEAIRHDVIVTIITAAKRDLALVNDQLLGFVRERTLDKRWRVRKEAMMGLAQLYKKYCLHGEAGKEAAEKVSWIKDKLLHIYYQNSIDDKLLVEKIFAQYLVPHNLETEERMKCLYYLYASLDPNAVKALNEMWKCQNMLRSHVRELLDLHKQPTSEANCSAMFGKLMTIAKNLPDPGKAQDFVKKFNQVLGDDEKLRSQLELLISPTCSCKQADICVVSKSYFTLFL

SEQ ID NO: 4884 - protein, 101 aa, Homo sapiens
MRAFPKDIFMVITSFPWHLIYFYFYLFIFLRRSFALVAQARVQWRDLGSLQPLPPGFKRFSCLSLQVAGITGMHHHARLICIFRDGVSPCWSGWSQTSNLR

SEQ ID NO: 4885 - protein, 336 aa, Homo sapiens
MAERGGAGGGSGQRGSGVAQSPQQPPPQQQQQQPPQQPTPPKLAQATSSSSSTSAAAASSSSSSTSTSMAVAVASGSAPPGGPGPGRTPAPVQMNLYATWEVDRSSSSCVPRLFSLTLKKLVMLKEMDKDLNSVVIAVKLQGSKRILRSNEIVLPASGLVETELQLTFSLQYPHFLKRDANKLQIMLQRRKRYKNRTILGYKTLAVGLINMAEVMQHPNEGALVLGLHSNVKDVSVPVAEIKIYSLSSQPIDHEGIKSKLSDRSPDIDNYSEEEEESFSSEQEGSDDPLHGQDLFYEDEDLRKVKKTRRKLTSTSAITRVSLKGLGSGWLRFSVWG

SEQ ID NO: 4886 - protein, 101 aa, Homo sapiens
MLVVWIPHLPRVSWVQSSEGCVSKQAWDLATAHSQACQLQWGGQLQAPAQVPAPCEAAAGQGRLQTASTVGIRECSGAQKLGDAGTAEPQRRHHSPGLGSS

SEQ ID NO: 4887 - DNA, 23 bp, Artificial Sequence
  Description of Artificial Sequence: an artificially synthesized primer sequence
gtacatattgtcgttagaacgcg

SEQ ID NO: 4888 - DNA, 27 bp, Artificial Sequence
  Description of Artificial Sequence: an artificially synthesized primer sequence
gatccgcgttctaacgacaatatgtac

SEQ ID NO: 4889 - DNA, 26 bp, Artificial Sequence
  Description of Artificial Sequence: an artificially synthesized primer sequence
gtacatattgtcgttagaacgcgact

SEQ ID NO: 4890 - DNA, 30 bp, Artificial Sequence
  Description of Artificial Sequence: an artificially synthesized primer sequence
gatcagtcgcgttctaacgacaatatgtac

SEQ ID NO: 4891 - DNA, 29 bp, Artificial Sequence
  Description of Artificial Sequence: an artificially synthesized primer sequence
gtacatattgtcgttagaacgcgcatact

SEQ ID NO: 4892 - DNA, 33 bp, Artificial Sequence
  Description of Artificial Sequence: an artificially synthesized primer sequence
gatcagtatgcgcgttctaacgacaatatgtac

SEQ ID NO: 4893 - DNA, 32 bp, Artificial Sequence
  Description of Artificial Sequence: an artificially synthesized primer sequence
gtacatattgtcgttagaacgcgatccatact

SEQ ID NO: 4894 - DNA, 36 bp, Artificial Sequence
  Description of Artificial Sequence: an artificially synthesized primer sequence
gatcagtatggatcgcgttctaacgacaatatgtac

SEQ ID NO: 4895 - DNA, 35 bp, Artificial Sequence
  Description of Artificial Sequence: an artificially synthesized primer sequence
gtacatattgtcgttagaacgcgtcaatccatact

SEQ ID NO: 4896 - DNA, 39 bp, Artificial Sequence
  Description of Artificial Sequence: an artificially synthesized primer sequence
gatcagtatggattgacgcgttctaacgacaatatgtac

SEQ ID NO: 4897 - DNA, 38 bp, Artificial Sequence
  Description of Artificial Sequence: an artificially synthesized primer sequence
gtacatattgtcgttagaacgcgtactcaatccatact

SEQ ID NO: 4898 - DNA, 42 bp, Artificial Sequence
  Description of Artificial Sequence: an artificially synthesized primer sequence
gatcagtatggattgagtacgcgttctaacgacaatatgtac

SEQ ID NO: 4899 - DNA, 22 bp, Artificial Sequence
  Description of Artificial Sequence: an artificially synthesized primer sequence
gtacatattgtcgttagaacgc

SEQ ID NO: 4900 - DNA, 18 bp, Artificial Sequence
  Description of Artificial Sequence: an artificially synthesized primer sequence
gtcctgaaggtagatgct

SEQ ID NO: 4901 - DNA, 18 bp, Artificial Sequence
  Description of Artificial Sequence: an artificially synthesized primer sequence
ggaggatagagcttggag

SEQ ID NO: 4902 - DNA, 18 bp, Artificial Sequence
  Description of Artificial Sequence: an artificially synthesized primer sequence
ataaaacaggaccaagga

SEQ ID NO: 4903 - DNA, 21 bp, Artificial Sequence
  Description of Artificial Sequence: an artificially synthesized primer sequence
aaataaggctaaaatggaact

SEQ ID NO: 4904 - DNA, 18 bp, Artificial Sequence
  Description of Artificial Sequence: an artificially synthesized primer sequence
agtgctcccaattatccg

SEQ ID NO: 4905 - DNA, 18 bp, Artificial Sequence
  Description of Artificial Sequence: an artificially synthesized primer sequence
tagaaaatatgctgggtg

SEQ ID NO: 4906 - DNA, 18 bp, Artificial Sequence
  Description of Artificial Sequence: an artificially synthesized primer sequence
tcattcttctcccacagc

SEQ ID NO: 4907 - DNA, 20 bp, Artificial Sequence
  Description of Artificial Sequence: an artificially synthesized primer sequence
agttttatttccaggctatc

SEQ ID NO: 4908 - DNA, 18 bp, Artificial Sequence
  Description of Artificial Sequence: an artificially synthesized primer sequence
atggagaacaggacagct

SEQ ID NO: 4909 - DNA, 18 bp, Artificial Sequence
  Description of Artificial Sequence: an artificially synthesized primer sequence
caaacatcaaccagagaa

SEQ ID NO: 4910 - DNA, 18 bp, Artificial Sequence
  Description of Artificial Sequence: an artificially synthesized primer sequence
tcccaatcagctaaggtc

SEQ ID NO: 4911 - DNA, 20 bp, Artificial Sequence
  Description of Artificial Sequence: an artificially synthesized primer sequence
caggttatcgagagttacat

SEQ ID NO: 4912 - DNA, 18 bp, Artificial Sequence
  Description of Artificial Sequence: an artificially synthesized primer sequence
tctggttggattttgtgc

SEQ ID NO: 4913 - DNA, 18 bp, Artificial Sequence
  Description of Artificial Sequence: an artificially synthesized primer sequence
tgaactttgtggtctggt

SEQ ID NO: 4914 - DNA, 19 bp, Artificial Sequence
  Description of Artificial Sequence: an artificially synthesized primer sequence
tgaacagtgacattttagg

SEQ ID NO: 4915 - DNA, 18 bp, Artificial Sequence
  Description of Artificial Sequence: an artificially synthesized primer sequence
aagaataaaagggacgag

SEQ ID NO: 4916 - DNA, 23 bp, Artificial Sequence
  Description of Artificial Sequence: an artificially synthesized primer sequence
gtttgatacagatgattaggtta

SEQ ID NO: 4917 - DNA, 19 bp, Artificial Sequence
  Description of Artificial Sequence: an artificially synthesized primer sequence
ggacaggtaagaactaggc

SEQ ID NO: 4918 - DNA, 18 bp, Artificial Sequence
  Description of Artificial Sequence: an artificially synthesized primer sequence
atcatctttccaatccag

SEQ ID NO: 4919 - DNA, 18 bp, Artificial Sequence
  Description of Artificial Sequence: an artificially synthesized primer sequence
gtaccacctgaccttctg

SEQ ID NO: 4920 - DNA, 20 bp, Artificial Sequence
  Description of Artificial Sequence: an artificially synthesized primer sequence
agaagttttatcccacattt

SEQ ID NO: 4921 - DNA, 18 bp, Artificial Sequence
  Description of Artificial Sequence: an artificially synthesized primer sequence
taacataaccctcccgtc

SEQ ID NO: 4922 - DNA, 18 bp, Artificial Sequence
  Description of Artificial Sequence: an artificially synthesized primer sequence
atagtggtgacgttcccc

SEQ ID NO: 4923 - DNA, 18 bp, Artificial Sequence
  Description of Artificial Sequence: an artificially synthesized primer sequence
tctgttgctgaaggaaaa

SEQ ID NO: 4924 - DNA, 18 bp, Artificial Sequence
  Description of Artificial Sequence: an artificially synthesized primer sequence
tcctgtgtgctatttgaa

SEQ ID NO: 4925 - DNA, 18 bp, Artificial Sequence
  Description of Artificial Sequence: an artificially synthesized primer sequence
aataacagcaactccaga

SEQ ID NO: 4926 - DNA, 18 bp, Artificial Sequence
  Description of Artificial Sequence: an artificially synthesized primer sequence
cccaacattaccaaaagt

SEQ ID NO: 4927 - DNA, 18 bp, Artificial Sequence
  Description of Artificial Sequence: an artificially synthesized primer sequence
caacattttcaagcactg

SEQ ID NO: 4928 - DNA, 18 bp, Artificial Sequence
  Description of Artificial Sequence: an artificially synthesized primer sequence
gatgttggggtttggaag

SEQ ID NO: 4929 - DNA, 18 bp, Artificial Sequence
  Description of Artificial Sequence: an artificially synthesized primer sequence
accagctgcccatagaag

SEQ ID NO: 4930 - DNA, 18 bp, Artificial Sequence
  Description of Artificial Sequence: an artificially synthesized primer sequence
gaaggcaagatggtaagt

SEQ ID NO: 4931 - DNA, 18 bp, Artificial Sequence
  Description of Artificial Sequence: an artificially synthesized primer sequence
catagagaaagcggggaa

SEQ ID NO: 4932 - DNA, 18 bp, Artificial Sequence
  Description of Artificial Sequence: an artificially synthesized primer sequence
tctccctgttctctcttt

SEQ ID NO: 4933 - DNA, 18 bp, Artificial Sequence
  Description of Artificial Sequence: an artificially synthesized primer sequence
tatgacccaaacgcctag

SEQ ID NO: 4934 - DNA, 18 bp, Artificial Sequence
  Description of Artificial Sequence: an artificially synthesized primer sequence
ccttctcatctagcttgc

SEQ ID NO: 4935 - DNA, 18 bp, Artificial Sequence
  Description of Artificial Sequence: an artificially synthesized primer sequence
tactgattgggaagcact

SEQ ID NO: 4936 - DNA, 18 bp, Artificial Sequence
  Description of Artificial Sequence: an artificially synthesized primer sequence
gttgaaatgcttgagcac

SEQ ID NO: 4937 - DNA, 18 bp, Artificial Sequence
  Description of Artificial Sequence: an artificially synthesized primer sequence
atttagagcgccatcctt

SEQ ID NO: 4938 - DNA, 18 bp, Artificial Sequence
  Description of Artificial Sequence: an artificially synthesized primer sequence
ctgagggtaaaggaaggg

SEQ ID NO: 4939 - DNA, 18 bp, Artificial Sequence
  Description of Artificial Sequence: an artificially synthesized primer sequence
ttttacgattgcctttgc

SEQ ID NO: 4940 - DNA, 18 bp, Artificial Sequence
  Description of Artificial Sequence: an artificially synthesized primer sequence
ttaggagtgaagacagga

SEQ ID NO: 4941 - DNA, 18 bp, Artificial Sequence
  Description of Artificial Sequence: an artificially synthesized primer sequence
gtgcagtgataagtggct

SEQ ID NO: 4942 - DNA, 18 bp, Artificial Sequence
  Description of Artificial Sequence: an artificially synthesized primer sequence
aggcagggaaagtagggt

SEQ ID NO: 4943 - DNA, 18 bp, Artificial Sequence
  Description of Artificial Sequence: an artificially synthesized primer sequence
aggagaggcttgaggact

SEQ ID NO: 4944 - DNA, 18 bp, Artificial Sequence
  Description of Artificial Sequence: an artificially synthesized primer sequence
aagggaccaaaatgagag

SEQ ID NO: 4945 - DNA, 18 bp, Artificial Sequence
  Description of Artificial Sequence: an artificially synthesized primer sequence
aacagccctctaatgaaa

SEQ ID NO: 4946 - DNA, 18 bp, Artificial Sequence
  Description of Artificial Sequence: an artificially synthesized primer sequence
actcatgttgctccacct

SEQ ID NO: 4947 - DNA, 18 bp, Artificial Sequence
  Description of Artificial Sequence: an artificially synthesized primer sequence
tatgtatggctttgagca

SEQ ID NO: 4948 - DNA, 18 bp, Artificial Sequence
  Description of Artificial Sequence: an artificially synthesized primer sequence
gctgaagaaatgtgctgc

SEQ ID NO: 4949 - DNA, 23 bp, Artificial Sequence
  Description of Artificial Sequence: an artificially synthesized primer sequence
atcatagttgtacatactttggg

SEQ ID NO: 4950 - DNA, 20 bp, Artificial Sequence
  Description of Artificial Sequence: an artificially synthesized primer sequence
ttctttcctgtaatagttgg

SEQ ID NO: 4951 - DNA, 19 bp, Artificial Sequence
  Description of Artificial Sequence: an artificially synthesized primer sequence
agctatctgtgaaagtcct

SEQ ID NO: 4952 - DNA, 18 bp, Artificial Sequence
  Description of Artificial Sequence: an artificially synthesized primer sequence
tgctgtctcgtgataaag

SEQ ID NO: 4953 - DNA, 18 bp, Artificial Sequence
  Description of Artificial Sequence: an artificially synthesized primer sequence
tttctaatggtttggcac

SEQ ID NO: 4954 - DNA, 18 bp, Artificial Sequence
  Description of Artificial Sequence: an artificially synthesized primer sequence
tcaacagtgcttttcctt

SEQ ID NO: 4955 - DNA, 18 bp, Artificial Sequence
  Description of Artificial Sequence: an artificially synthesized primer sequence
gactcttctccagggtgc

SEQ ID NO: 4956 - DNA, 18 bp, Artificial Sequence
  Description of Artificial Sequence: an artificially synthesized primer sequence
cacgccattctgttaaaa

SEQ ID NO: 4957 - DNA, 18 bp, Artificial Sequence
  Description of Artificial Sequence: an artificially synthesized primer sequence
aatgggctaaatattgct

SEQ ID NO: 4958 - DNA, 21 bp, Artificial Sequence
  Description of Artificial Sequence: an artificially synthesized primer sequence
gcaaatacaggtaaatgacag

SEQ ID NO: 4959 - DNA, 21 bp, Artificial Sequence
  Description of Artificial Sequence: an artificially synthesized primer sequence
caagagaaattaaagaagacc

SEQ ID NO: 4960 - DNA, 18 bp, Artificial Sequence
  Description of Artificial Sequence: an artificially synthesized primer sequence
tgctttcaactgtcattt

SEQ ID NO: 4961 - DNA, 18 bp, Artificial Sequence
  Description of Artificial Sequence: an artificially synthesized primer sequence
gaatgatgcccgatgtag

SEQ ID NO: 4962 - DNA, 18 bp, Artificial Sequence
  Description of Artificial Sequence: an artificially synthesized primer sequence
gaatatccctgtggagtc

SEQ ID NO: 4963 - DNA, 18 bp, Artificial Sequence
  Description of Artificial Sequence: an artificially synthesized primer sequence
agtctcactctattgcca

SEQ ID NO: 4964 - DNA, 18 bp, Artificial Sequence
  Description of Artificial Sequence: an artificially synthesized primer sequence
aacgaatagcagggtagc

SEQ ID NO: 4965 - DNA, 18 bp, Artificial Sequence
  Description of Artificial Sequence: an artificially synthesized primer sequence
ggtgacttactggctgca

SEQ ID NO: 4966 - DNA, 22 bp, Artificial Sequence
  Description of Artificial Sequence: an artificially synthesized primer sequence
aagattaaccatacaacagaaa

SEQ ID NO: 4967 - DNA, 18 bp, Artificial Sequence
  Description of Artificial Sequence: an artificially synthesized primer sequence
tgaacaagaaacaccagt

SEQ ID NO: 4968 - DNA, 18 bp, Artificial Sequence
  Description of Artificial Sequence: an artificially synthesized primer sequence
aggaggcacggtaacaat

SEQ ID NO: 4969 - DNA, 18 bp, Artificial Sequence
  Description of Artificial Sequence: an artificially synthesized primer sequence
gtcttctgtctcatgggg

SEQ ID NO: 4970 - DNA, 18 bp, Artificial Sequence
  Description of Artificial Sequence: an artificially synthesized primer sequence
aaagttcatgaggggctg

SEQ ID NO: 4971 - DNA, 19 bp, Artificial Sequence
  Description of Artificial Sequence: an artificially synthesized primer sequence
cagcacaaaatcagttaaa

SEQ ID NO: 4972 - DNA, 22 bp, Artificial Sequence
  Description of Artificial Sequence: an artificially synthesized primer sequence
ggtttagatttatgagacaaga

SEQ ID NO: 4973 - DNA, 18 bp, Artificial Sequence
  Description of Artificial Sequence: an artificially synthesized primer sequence
gttactgcagggcttcag

SEQ ID NO: 4974 - DNA, 18 bp, Artificial Sequence
  Description of Artificial Sequence: an artificially synthesized primer sequence
tgcatggaattaaggagt

SEQ ID NO: 4975 - DNA, 21 bp, Artificial Sequence
  Description of Artificial Sequence: an artificially synthesized primer sequence
aatctgtaaaatgggaataag

SEQ ID NO: 4976 - DNA, 18 bp, Artificial Sequence
  Description of Artificial Sequence: an artificially synthesized primer sequence
atgagattgtgttgtcca

SEQ ID NO: 4977 - DNA, 18 bp, Artificial Sequence
  Description of Artificial Sequence: an artificially synthesized primer sequence
ttccagcattttcgtttt

SEQ ID NO: 4978 - DNA, 18 bp, Artificial Sequence
  Description of Artificial Sequence: an artificially synthesized primer sequence
ttcccaagtccagatttt

SEQ ID NO: 4979 - DNA, 18 bp, Artificial Sequence
  Description of Artificial Sequence: an artificially synthesized primer sequence
ctgaggagcagtgacaag

SEQ ID NO: 4980 - DNA, 18 bp, Artificial Sequence
  Description of Artificial Sequence: an artificially synthesized primer sequence
gggagagaagagtcctgc

SEQ ID NO: 4981 - DNA, 20 bp, Artificial Sequence
  Description of Artificial Sequence: an artificially synthesized primer sequence
gctatgaagacaaccaaact

SEQ ID NO: 4982 - DNA, 18 bp, Artificial Sequence
  Description of Artificial Sequence: an artificially synthesized primer sequence
aggaagagatgggtcagc

SEQ ID NO: 4983 - DNA, 20 bp, Artificial Sequence
  Description of Artificial Sequence: an artificially synthesized primer sequence
ggagtatcaccatgtaaaga

SEQ ID NO: 4984 - DNA, 18 bp, Artificial Sequence
  Description of Artificial Sequence: an artificially synthesized primer sequence
aaatgagcactccattcc

SEQ ID NO: 4985 - DNA, 18 bp, Artificial Sequence
  Description of Artificial Sequence: an artificially synthesized primer sequence
aatgagcactccattccc

SEQ ID NO: 4986 - DNA, 18 bp, Artificial Sequence
  Description of Artificial Sequence: an artificially synthesized primer sequence
cattttattgtcacccac

SEQ ID NO: 4987 - DNA, 21 bp, Artificial Sequence
  Description of Artificial Sequence: an artificially synthesized primer sequence
cctttaacagcatctctagtg

SEQ ID NO: 4988 - DNA, 18 bp, Artificial Sequence
  Description of Artificial Sequence: an artificially synthesized primer sequence
gttgagctatttgcagag

SEQ ID NO: 4989 - DNA, 18 bp, Artificial Sequence
  Description of Artificial Sequence: an artificially synthesized primer sequence
cttagcaactttccacac

SEQ ID NO: 4990 - DNA, 18 bp, Artificial Sequence
  Description of Artificial Sequence: an artificially synthesized primer sequence
gtcagaaaactcacacca

SEQ ID NO: 4991 - DNA, 19 bp, Artificial Sequence
  Description of Artificial Sequence: an artificially synthesized primer sequence
aagttgatagggaaggttt

SEQ ID NO: 4992 - DNA, 18 bp, Artificial Sequence
  Description of Artificial Sequence: an artificially synthesized primer sequence
accatgtgctcagaatca

SEQ ID NO: 4993 - DNA, 18 bp, Artificial Sequence
  Description of Artificial Sequence: an artificially synthesized primer sequence
taagattcacagggtgga

SEQ ID NO: 4994 - DNA, 18 bp, Artificial Sequence
  Description of Artificial Sequence: an artificially synthesized primer sequence
gatggaaaatgtaaggct

SEQ ID NO: 4995 - DNA, 18 bp, Artificial Sequence
  Description of Artificial Sequence: an artificially synthesized primer sequence
ccatcctctacacagcag

SEQ ID NO: 4996 - DNA, 18 bp, Artificial Sequence
  Description of Artificial Sequence: an artificially synthesized primer sequence
ctctcattttggctctgc

SEQ ID NO: 4997 - DNA, 18 bp, Artificial Sequence
  Description of Artificial Sequence: an artificially synthesized primer sequence
ctactccacctctgctgc

SEQ ID NO: 4998 - DNA, 18 bp, Artificial Sequence
  Description of Artificial Sequence: an artificially synthesized primer sequence
agttttctgatggccttg

SEQ ID NO: 4999 - DNA, 18 bp, Artificial Sequence
  Description of Artificial Sequence: an artificially synthesized primer sequence
aggtagccccagagtcac

SEQ ID NO: 5000 - DNA, 18 bp, Artificial Sequence
  Description of Artificial Sequence: an artificially synthesized primer sequence
actcagcaatcaggtcca

SEQ ID NO: 5001 - DNA, 23 bp, Artificial Sequence
  Description of Artificial Sequence: an artificially synthesized primer sequence
aattatgagataggatgttagct

SEQ ID NO: 5002 - DNA, 18 bp, Artificial Sequence
  Description of Artificial Sequence: an artificially synthesized primer sequence
ctgcaccgattttatagc

SEQ ID NO: 5003 - DNA, 18 bp, Artificial Sequence
  Description of Artificial Sequence: an artificially synthesized primer sequence
cactatccagacacacct

SEQ ID NO: 5004 - DNA, 19 bp, Artificial Sequence
  Description of Artificial Sequence: an artificially synthesized primer sequence
cactggattttcttcactt

SEQ ID NO: 5005 - DNA, 18 bp, Artificial Sequence
  Description of Artificial Sequence: an artificially synthesized primer sequence
ggaaggatagcagttgat

SEQ ID NO: 5006 - DNA, 18 bp, Artificial Sequence
  Description of Artificial Sequence: an artificially synthesized primer sequence
tccaagcagagttttcac

SEQ ID NO: 5007 - DNA, 18 bp, Artificial Sequence
  Description of Artificial Sequence: an artificially synthesized primer sequence
caagtctgttcatctggt

SEQ ID NO: 5008 - DNA, 18 bp, Artificial Sequence
  Description of Artificial Sequence: an artificially synthesized primer sequence
acttgaggtttcttggca

SEQ ID NO: 5009 - DNA, 18 bp, Artificial Sequence
  Description of Artificial Sequence: an artificially synthesized primer sequence
gattcttccccgactcag

SEQ ID NO: 5010 - DNA, 18 bp, Artificial Sequence
  Description of Artificial Sequence: an artificially synthesized primer sequence
gtacacacctgctcccac

SEQ ID NO: 5011 - DNA, 18 bp, Artificial Sequence
  Description of Artificial Sequence: an artificially synthesized primer sequence
ggtcagtaagtggttgtg

SEQ ID NO: 5012 - DNA, 18 bp, Artificial Sequence
  Description of Artificial Sequence: an artificially synthesized primer sequence
ttattttggatgcccctg

SEQ ID NO: 5013 - DNA, 18 bp, Artificial Sequence
  Description of Artificial Sequence: an artificially synthesized primer sequence
actccaacaaccttcatt

SEQ ID NO: 5014 - DNA, 18 bp, Artificial Sequence
  Description of Artificial Sequence: an artificially synthesized primer sequence
tttcaagtatcctcccca

SEQ ID NO: 5015 - DNA, 18 bp, Artificial Sequence
  Description of Artificial Sequence: an artificially synthesized primer sequence
tagaactgcctccaaccc

SEQ ID NO: 5016 - DNA, 18 bp, Artificial Sequence
  Description of Artificial Sequence: an artificially synthesized primer sequence
tactgaacggtgactggc

SEQ ID NO: 5017 - DNA, 18 bp, Artificial Sequence
  Description of Artificial Sequence: an artificially synthesized primer sequence
acaggaaggggaaagagt

SEQ ID NO: 5018 - DNA, 18 bp, Artificial Sequence
  Description of Artificial Sequence: an artificially synthesized primer sequence
gaggagagtgagaagggg

SEQ ID NO: 5019 - DNA, 18 bp, Artificial Sequence
  Description of Artificial Sequence: an artificially synthesized primer sequence
aggtcaggagaacaagcc

SEQ ID NO: 5020 - DNA, 18 bp, Artificial Sequence
  Description of Artificial Sequence: an artificially synthesized primer sequence
cttttgcagagttttcct

SEQ ID NO: 5021 - DNA, 18 bp, Artificial Sequence
  Description of Artificial Sequence: an artificially synthesized primer sequence
tctctagggcaaaacatt

SEQ ID NO: 5022 - DNA, 18 bp, Artificial Sequence
  Description of Artificial Sequence: an artificially synthesized primer sequence
aattgatacgcaggggag

SEQ ID NO: 5023 - DNA, 18 bp, Artificial Sequence
  Description of Artificial Sequence: an artificially synthesized primer sequence
aaggtcagttgaagtgct

SEQ ID NO: 5024 - DNA, 18 bp, Artificial Sequence
  Description of Artificial Sequence: an artificially synthesized primer sequence
tagagaaggtgaggccag

SEQ ID NO: 5025 - DNA, 20 bp, Artificial Sequence
  Description of Artificial Sequence: an artificially synthesized primer sequence
ggcatagaagtaatcagaga

SEQ ID NO: 5026 - DNA, 18 bp, Artificial Sequence
  Description of Artificial Sequence: an artificially synthesized primer sequence
aagctgaaccccaataaa

SEQ ID NO: 5027 - DNA, 18 bp, Artificial Sequence
  Description of Artificial Sequence: an artificially synthesized primer sequence
gattaccagaacacagcc

SEQ ID NO: 5028 - DNA, 18 bp, Artificial Sequence
  Description of Artificial Sequence: an artificially synthesized primer sequence
gtccatttaccaacggct

SEQ ID NO: 5029 - DNA, 24 bp, Artificial Sequence
  Description of Artificial Sequence: an artificially synthesized primer sequence
cacatctttacatttattgctatt

SEQ ID NO: 5030 - DNA, 18 bp, Artificial Sequence
  Description of Artificial Sequence: an artificially synthesized primer sequence
tcttctcgtagggcttga

SEQ ID NO: 5031 - DNA, 18 bp, Artificial Sequence
  Description of Artificial Sequence: an artificially synthesized primer sequence
aaacacgaaatggatgaa

SEQ ID NO: 5032 - DNA, 18 bp, Artificial Sequence
  Description of Artificial Sequence: an artificially synthesized primer sequence
agaatcagagaagccggt

SEQ ID NO: 5033 - DNA, 18 bp, Artificial Sequence
  Description of Artificial Sequence: an artificially synthesized primer sequence
atacccatttcagttcct

SEQ ID NO: 5034 - DNA, 18 bp, Artificial Sequence
  Description of Artificial Sequence: an artificially synthesized primer sequence
cagtcccaatacagctca

SEQ ID NO: 5035 - DNA, 18 bp, Artificial Sequence
  Description of Artificial Sequence: an artificially synthesized primer sequence
caatgactagtttgtgca

SEQ ID NO: 5036 - DNA, 18 bp, Artificial Sequence
  Description of Artificial Sequence: an artificially synthesized primer sequence
aaagaagccaggaagatt

SEQ ID NO: 5037 - DNA, 18 bp, Artificial Sequence
  Description of Artificial Sequence: an artificially synthesized primer sequence
acatggagcctggtttag

SEQ ID NO: 5038 - DNA, 19 bp, Artificial Sequence
  Description of Artificial Sequence: an artificially synthesized primer sequence
tggaagatacggataactc

SEQ ID NO: 5039 - DNA, 18 bp, Artificial Sequence
  Description of Artificial Sequence: an artificially synthesized primer sequence
accactgttctctggtgc

SEQ ID NO: 5040 - DNA, 18 bp, Artificial Sequence
  Description of Artificial Sequence: an artificially synthesized primer sequence
ccaccactgttctctggt

SEQ ID NO: 5041 - DNA, 18 bp, Artificial Sequence
  Description of Artificial Sequence: an artificially synthesized primer sequence
tcggattgggttaaggtc

SEQ ID NO: 5042 - DNA, 18 bp, Artificial Sequence
  Description of Artificial Sequence: an artificially synthesized primer sequence
ctccattcatcagaccac

SEQ ID NO: 5043 - DNA, 18 bp, Artificial Sequence
  Description of Artificial Sequence: an artificially synthesized primer sequence
tccaaaagacagaacagc

SEQ ID NO: 5044 - DNA, 18 bp, Artificial Sequence
  Description of Artificial Sequence: an artificially synthesized primer sequence
gttttgttccctgctcac

SEQ ID NO: 5045 - DNA, 18 bp, Artificial Sequence
  Description of Artificial Sequence: an artificially synthesized primer sequence
aacacagctcaacaactc

SEQ ID NO: 5046 - DNA, 18 bp, Artificial Sequence
  Description of Artificial Sequence: an artificially synthesized primer sequence
tgactaagcatggagact

SEQ ID NO: 5047 - DNA, 20 bp, Artificial Sequence
  Description of Artificial Sequence: an artificially synthesized primer sequence
agtcataatcatcttcctca

SEQ ID NO: 5048 - DNA, 24 bp, Artificial Sequence
  Description of Artificial Sequence: an artificially synthesized primer sequence
ggtggagtaatgtatataacgtaa

SEQ ID NO: 5049 - DNA, 18 bp, Artificial Sequence
  Description of Artificial Sequence: an artificially synthesized primer sequence
ccattaacacaaaccaaa

SEQ ID NO: 5050 - DNA, 18 bp, Artificial Sequence
  Description of Artificial Sequence: an artificially synthesized primer sequence
ggaagatgggacctcagt

SEQ ID NO: 5051 - DNA, 18 bp, Artificial Sequence
  Description of Artificial Sequence: an artificially synthesized primer sequence
ttggggtatcttggagct

SEQ ID NO: 5052 - DNA, 20 bp, Artificial Sequence
  Description of Artificial Sequence: an artificially synthesized primer sequence
ggcatagaagtaatcagaga

SEQ ID NO: 5053 - DNA, 19 bp, Artificial Sequence
  Description of Artificial Sequence: an artificially synthesized primer sequence
tcaaacctcctatcttctg

SEQ ID NO: 5054 - DNA, 22 bp, Artificial Sequence
  Description of Artificial Sequence: an artificially synthesized primer sequence
ttttaatcctcagtacattttc

SEQ ID NO: 5055 - DNA, 18 bp, Artificial Sequence
  Description of Artificial Sequence: an artificially synthesized primer sequence
aaataggttgatgttggc

SEQ ID NO: 5056 - DNA, 18 bp, Artificial Sequence
  Description of Artificial Sequence: an artificially synthesized primer sequence
tgactttggccctttacc

SEQ ID NO: 5057 - DNA, 18 bp, Artificial Sequence
  Description of Artificial Sequence: an artificially synthesized primer sequence
gggtaggtgctagaaatc

SEQ ID NO: 5058 - DNA, 18 bp, Artificial Sequence
  Description of Artificial Sequence: an artificially synthesized primer sequence
ggagaccacacataacat

SEQ ID NO: 5059 - DNA, 18 bp, Artificial Sequence
  Description of Artificial Sequence: an artificially synthesized primer sequence
cactgacgaaagggaaga

SEQ ID NO: 5060 - DNA, 18 bp, Artificial Sequence
  Description of Artificial Sequence: an artificially synthesized primer sequence
cgacttgccagactcact

SEQ ID NO: 5061 - DNA, 18 bp, Artificial Sequence
  Description of Artificial Sequence: an artificially synthesized primer sequence
gtggctcaaagtaggatt

SEQ ID NO: 5062 - DNA, 18 bp, Artificial Sequence
  Description of Artificial Sequence: an artificially synthesized primer sequence
cttactccaacccaggct

SEQ ID NO: 5063 - DNA, 18 bp, Artificial Sequence
  Description of Artificial Sequence: an artificially synthesized primer sequence
tgcatgttttcttcctca

SEQ ID NO: 5064 - DNA, 18 bp, Artificial Sequence
  Description of Artificial Sequence: an artificially synthesized primer sequence
ccagacacaacaatacca

SEQ ID NO: 5065 - DNA, 19 bp, Artificial Sequence
  Description of Artificial Sequence: an artificially synthesized primer sequence
atacaatttgtgcctgtta

SEQ ID NO: 5066 - DNA, 20 bp, Artificial Sequence
  Description of Artificial Sequence: an artificially synthesized primer sequence
cggtaagtagtcttcatgtg

SEQ ID NO: 5067 - DNA, 18 bp, Artificial Sequence
  Description of Artificial Sequence: an artificially synthesized primer sequence
ggtgcatctgtacttgaa

SEQ ID NO: 5068 - DNA, 21 bp, Artificial Sequence
  Description of Artificial Sequence: an artificially synthesized primer sequence
tggaggagtagttatcagttg

SEQ ID NO: 5069 - DNA, 18 bp, Artificial Sequence
  Description of Artificial Sequence: an artificially synthesized primer sequence
agtgctcccaattatccg

SEQ ID NO: 5070 - DNA, 18 bp, Artificial Sequence
  Description of Artificial Sequence: an artificially synthesized primer sequence
ggctactcaaggacacag

SEQ ID NO: 5071 - DNA, 18 bp, Artificial Sequence
  Description of Artificial Sequence: an artificially synthesized primer sequence
agggataagatggcaggt

SEQ ID NO: 5072 - DNA, 18 bp, Artificial Sequence
  Description of Artificial Sequence: an artificially synthesized primer sequence
tcctgtactcctttccat

SEQ ID NO: 5073 - DNA, 18 bp, Artificial Sequence
  Description of Artificial Sequence: an artificially synthesized primer sequence
caggcataagaggtggct

SEQ ID NO: 5074 - DNA, 20 bp, Artificial Sequence
  Description of Artificial Sequence: an artificially synthesized primer sequence
cctgtgtgataccaaatact

SEQ ID NO: 5075 - DNA, 18 bp, Artificial Sequence
  Description of Artificial Sequence: an artificially synthesized primer sequence
cagccccaattactagaa

SEQ ID NO: 5076 - DNA, 18 bp, Artificial Sequence
  Description of Artificial Sequence: an artificially synthesized primer sequence
agcatgtactgggaaagc

SEQ ID NO: 5077 - DNA, 18 bp, Artificial Sequence
  Description of Artificial Sequence: an artificially synthesized primer sequence
agggataaagaatgcaaa

SEQ ID NO: 5078 - DNA, 18 bp, Artificial Sequence
  Description of Artificial Sequence: an artificially synthesized primer sequence
gagcttcaggggcattta

SEQ ID NO: 5079 - DNA, 18 bp, Artificial Sequence
  Description of Artificial Sequence: an artificially synthesized primer sequence
atacgcaattttcagacc

SEQ ID NO: 5080 - DNA, 18 bp, Artificial Sequence
  Description of Artificial Sequence: an artificially synthesized primer sequence
aaaagacaacgatgcctg

SEQ ID NO: 5081 - DNA, 21 bp, Artificial Sequence
  Description of Artificial Sequence: an artificially synthesized primer sequence
aaagcaaagtgatataggagt

SEQ ID NO: 5082 - DNA, 18 bp, Artificial Sequence
  Description of Artificial Sequence: an artificially synthesized primer sequence
acatttcagtccattcac

SEQ ID NO: 5083 - DNA, 18 bp, Artificial Sequence
  Description of Artificial Sequence: an artificially synthesized primer sequence
ttgtcatggtggtaatcc

SEQ ID NO: 5084 - DNA, 18 bp, Artificial Sequence
  Description of Artificial Sequence: an artificially synthesized primer sequence
ggaccagactcacaaatt

SEQ ID NO: 5085 - DNA, 18 bp, Artificial Sequence
  Description of Artificial Sequence: an artificially synthesized primer sequence
tatactaaaacccagcca

SEQ ID NO: 5086 - DNA, 18 bp, Artificial Sequence
  Description of Artificial Sequence: an artificially synthesized primer sequence
cggcagctagaaaacctc

SEQ ID NO: 5087 - DNA, 18 bp, Artificial Sequence
  Description of Artificial Sequence: an artificially synthesized primer sequence
cgttggttttctggacac

SEQ ID NO: 5088 - DNA, 18 bp, Artificial Sequence
  Description of Artificial Sequence: an artificially synthesized primer sequence
ctcgggcaggattaactc

SEQ ID NO: 5089 - DNA, 18 bp, Artificial Sequence
  Description of Artificial Sequence: an artificially synthesized primer sequence
agaagatgctaggtttgc

SEQ ID NO: 5090 - DNA, 18 bp, Artificial Sequence
  Description of Artificial Sequence: an artificially synthesized primer sequence
agcatgtactgggaaagc

SEQ ID NO: 5091 - DNA, 18 bp, Artificial Sequence
  Description of Artificial Sequence: an artificially synthesized primer sequence
gcttatgttgcagtttca

SEQ ID NO: 5092 - DNA, 18 bp, Artificial Sequence
  Description of Artificial Sequence: an artificially synthesized primer sequence
tcagtttcaggggtcaag

SEQ ID NO: 5093 - DNA, 18 bp, Artificial Sequence
  Description of Artificial Sequence: an artificially synthesized primer sequence
tcagggtatcagctttcc

SEQ ID NO: 5094 - DNA, 18 bp, Artificial Sequence
  Description of Artificial Sequence: an artificially synthesized primer sequence
tgtggtgacttactgcct

SEQ ID NO: 5095 - DNA, 18 bp, Artificial Sequence
  Description of Artificial Sequence: an artificially synthesized primer sequence
ctctccaacaaactgcac

SEQ ID NO: 5096 - DNA, 18 bp, Artificial Sequence
  Description of Artificial Sequence: an artificially synthesized primer sequence
ctgctgccttacacaacc

SEQ ID NO: 5097 - DNA, 18 bp, Artificial Sequence
  Description of Artificial Sequence: an artificially synthesized primer sequence
aggtaatgaggaatgcac

SEQ ID NO: 5098 - DNA, 18 bp, Artificial Sequence
  Description of Artificial Sequence: an artificially synthesized primer sequence
gattccaccctcaagatt

SEQ ID NO: 5099 - DNA, 18 bp, Artificial Sequence
  Description of Artificial Sequence: an artificially synthesized primer sequence
ctcctccacgcttgtttt

SEQ ID NO: 5100 - DNA, 18 bp, Artificial Sequence
  Description of Artificial Sequence: an artificially synthesized primer sequence
cttggtcacagttttcat

SEQ ID NO: 5101 - DNA, 18 bp, Artificial Sequence
  Description of Artificial Sequence: an artificially synthesized primer sequence
cacactttcaatccgagg

SEQ ID NO: 5102 - DNA, 18 bp, Artificial Sequence
  Description of Artificial Sequence: an artificially synthesized primer sequence
gtggaagatgctcgactg

SEQ ID NO: 5103 - DNA, 20 bp, Artificial Sequence
  Description of Artificial Sequence: an artificially synthesized primer sequence
aggattaggtattgcttctc

SEQ ID NO: 5104 - DNA, 18 bp, Artificial Sequence
  Description of Artificial Sequence: an artificially synthesized primer sequence
taaggaaaacccaaccac

SEQ ID NO: 5105 - DNA, 18 bp, Artificial Sequence
  Description of Artificial Sequence: an artificially synthesized primer sequence
gaaagacacctggcacac

SEQ ID NO: 5106 - DNA, 18 bp, Artificial Sequence
  Description of Artificial Sequence: an artificially synthesized primer sequence
gtaccccaaaagaaacat

SEQ ID NO: 5107 - DNA, 20 bp, Artificial Sequence
  Description of Artificial Sequence: an artificially synthesized primer sequence
gaactatctaatcacatggg

SEQ ID NO: 5108 - DNA, 18 bp, Artificial Sequence
  Description of Artificial Sequence: an artificially synthesized primer sequence
tcttgatgtctcctgcct

SEQ ID NO: 5109 - DNA, 18 bp, Artificial Sequence
  Description of Artificial Sequence: an artificially synthesized primer sequence
ctcggctggaaggtaaaa

SEQ ID NO: 5110 - DNA, 18 bp, Artificial Sequence
  Description of Artificial Sequence: an artificially synthesized primer sequence
actggtaagatatgggca

SEQ ID NO: 5111 - DNA, 18 bp, Artificial Sequence
  Description of Artificial Sequence: an artificially synthesized primer sequence
ctctcccaaactcaggtc

SEQ ID NO: 5112 - DNA, 18 bp, Artificial Sequence
  Description of Artificial Sequence: an artificially synthesized primer sequence
tgacccaaagacatactg

SEQ ID NO: 5113 - DNA, 18 bp, Artificial Sequence
  Description of Artificial Sequence: an artificially synthesized primer sequence
gatttacttccggtttcg

SEQ ID NO: 5114 - DNA, 18 bp, Artificial Sequence
  Description of Artificial Sequence: an artificially synthesized primer sequence
aagagaataaggctgggc

SEQ ID NO: 5115 - DNA, 18 bp, Artificial Sequence
  Description of Artificial Sequence: an artificially synthesized primer sequence
aacaaaataaggggccag

SEQ ID NO: 5116 - DNA, 18 bp, Artificial Sequence
  Description of Artificial Sequence: an artificially synthesized primer sequence
aagttcatctgggtgtgg

SEQ ID NO: 5117 - DNA, 18 bp, Artificial Sequence
  Description of Artificial Sequence: an artificially synthesized primer sequence
atcacctggagagctttg

SEQ ID NO: 5118 - DNA, 18 bp, Artificial Sequence
  Description of Artificial Sequence: an artificially synthesized primer sequence
agggacactgagaactgg

SEQ ID NO: 5119 - DNA, 18 bp, Artificial Sequence
  Description of Artificial Sequence: an artificially synthesized primer sequence
gaagcagggaagtgtgag

SEQ ID NO: 5120 - DNA, 20 bp, Artificial Sequence
  Description of Artificial Sequence: an artificially synthesized primer sequence
gctattacacattctgcatt

SEQ ID NO: 5121 - DNA, 18 bp, Artificial Sequence
  Description of Artificial Sequence: an artificially synthesized primer sequence
cagctacttgggacagga

SEQ ID NO: 5122 - DNA, 18 bp, Artificial Sequence
  Description of Artificial Sequence: an artificially synthesized primer sequence
accagctcagcaagaact

SEQ ID NO: 5123 - DNA, 18 bp, Artificial Sequence
  Description of Artificial Sequence: an artificially synthesized primer sequence
ctctgacatgaactggtg

SEQ ID NO: 5124 - DNA, 18 bp, Artificial Sequence
  Description of Artificial Sequence: an artificially synthesized primer sequence
cacattgcctagagaaag

SEQ ID NO: 5125 - DNA, 18 bp, Artificial Sequence
  Description of Artificial Sequence: an artificially synthesized primer sequence
acaacagcagatgactcg

SEQ ID NO: 5126 - DNA, 18 bp, Artificial Sequence
  Description of Artificial Sequence: an artificially synthesized primer sequence
cagtcacatctcccttta

SEQ ID NO: 5127 - DNA, 18 bp, Artificial Sequence
  Description of Artificial Sequence: an artificially synthesized primer sequence
tcactgtatcaccatctg

SEQ ID NO: 5128 - DNA, 18 bp, Artificial Sequence
  Description of Artificial Sequence: an artificially synthesized primer sequence
tccctgctaagatgttga

SEQ ID NO: 5129 - DNA, 18 bp, Artificial Sequence
  Description of Artificial Sequence: an artificially synthesized primer sequence
gaggtcaaggacacacag

SEQ ID NO: 5130 - DNA, 18 bp, Artificial Sequence
  Description of Artificial Sequence: an artificially synthesized primer sequence
aagcaatgtggcagactc

SEQ ID NO: 5131 - DNA, 20 bp, Artificial Sequence
  Description of Artificial Sequence: an artificially synthesized primer sequence
agtgggttctttatcatttt

SEQ ID NO: 5132 - DNA, 18 bp, Artificial Sequence
  Description of Artificial Sequence: an artificially synthesized primer sequence
gtttgccagggaatgttt

SEQ ID NO: 5133 - DNA, 18 bp, Artificial Sequence
  Description of Artificial Sequence: an artificially synthesized primer sequence
gtaacgtgctctgaatga

SEQ ID NO: 5134 - DNA, 19 bp, Artificial Sequence
  Description of Artificial Sequence: an artificially synthesized primer sequence
gctctgctgtttctaattt

SEQ ID NO: 5135 - DNA, 18 bp, Artificial Sequence
  Description of Artificial Sequence: an artificially synthesized primer sequence
tcgatacgtggaagaatt

SEQ ID NO: 5136 - DNA, 18 bp, Artificial Sequence
  Description of Artificial Sequence: an artificially synthesized primer sequence
tcccaaggctgtagttca

SEQ ID NO: 5137 - DNA, 20 bp, Artificial Sequence
  Description of Artificial Sequence: an artificially synthesized primer sequence
agcttgtatctaaattcgtg

SEQ ID NO: 5138 - DNA, 18 bp, Artificial Sequence
  Description of Artificial Sequence: an artificially synthesized primer sequence
cagaagacaggttgccag

SEQ ID NO: 5139 - DNA, 18 bp, Artificial Sequence
  Description of Artificial Sequence: an artificially synthesized primer sequence
cctaagattggtcgtcct

SEQ ID NO: 5140 - DNA, 18 bp, Artificial Sequence
  Description of Artificial Sequence: an artificially synthesized primer sequence
atcctgtcatcttttcgc

SEQ ID NO: 5141 - DNA, 18 bp, Artificial Sequence
  Description of Artificial Sequence: an artificially synthesized primer sequence
tggctaaggttctcagga

SEQ ID NO: 5142 - DNA, 19 bp, Artificial Sequence
  Description of Artificial Sequence: an artificially synthesized primer sequence
gggtcagtaaatctaatgc

SEQ ID NO: 5143 - DNA, 21 bp, Artificial Sequence
  Description of Artificial Sequence: an artificially synthesized primer sequence
caaaacacagagttatcagaa

SEQ ID NO: 5144 - DNA, 20 bp, Artificial Sequence
  Description of Artificial Sequence: an artificially synthesized primer sequence
tgctgtcctagaagaataaa

SEQ ID NO: 5145 - DNA, 20 bp, Artificial Sequence
  Description of Artificial Sequence: an artificially synthesized primer sequence
acaattatactggaaaagca

SEQ ID NO: 5146 - DNA, 18 bp, Artificial Sequence
  Description of Artificial Sequence: an artificially synthesized primer sequence
gctgagaccttttgctag

SEQ ID NO: 5147 - DNA, 18 bp, Artificial Sequence
  Description of Artificial Sequence: an artificially synthesized primer sequence
agccgaggttttgagtta

SEQ ID NO: 5148 - DNA, 18 bp, Artificial Sequence
  Description of Artificial Sequence: an artificially synthesized primer sequence
acatttgcactggaactg

SEQ ID NO: 5149 - DNA, 18 bp, Artificial Sequence
  Description of Artificial Sequence: an artificially synthesized primer sequence
ctcagaagcccagcaatt

SEQ ID NO: 5150 - DNA, 21 bp, Artificial Sequence
  Description of Artificial Sequence: an artificially synthesized primer sequence
acatcataatcaagcagtaaa

SEQ ID NO: 5151 - DNA, 18 bp, Artificial Sequence
  Description of Artificial Sequence: an artificially synthesized primer sequence
aggacagcaacaagagag

SEQ ID NO: 5152 - DNA, 18 bp, Artificial Sequence
  Description of Artificial Sequence: an artificially synthesized primer sequence
agagctgatttatacgca

SEQ ID NO: 5153 - DNA, 18 bp, Artificial Sequence
  Description of Artificial Sequence: an artificially synthesized primer sequence
aaggagtctacgaagcac

SEQ ID NO: 5154 - DNA, 18 bp, Artificial Sequence
  Description of Artificial Sequence: an artificially synthesized primer sequence
aagatgaccccgagtttg

SEQ ID NO: 5155 - DNA, 18 bp, Artificial Sequence
  Description of Artificial Sequence: an artificially synthesized primer sequence
catgcaaatagaggactg

SEQ ID NO: 5156 - DNA, 18 bp, Artificial Sequence
  Description of Artificial Sequence: an artificially synthesized primer sequence
ccatactgttctctgctg

SEQ ID NO: 5157 - DNA, 20 bp, Artificial Sequence
  Description of Artificial Sequence: an artificially synthesized primer sequence
ccgtaacttttatatgcctg

SEQ ID NO: 5158 - DNA, 18 bp, Artificial Sequence
  Description of Artificial Sequence: an artificially synthesized primer sequence
gcaagagctacagacaaa

SEQ ID NO: 5159 - DNA, 18 bp, Artificial Sequence
  Description of Artificial Sequence: an artificially synthesized primer sequence
agtgtgcagaaatccgtg

SEQ ID NO: 5160 - DNA, 18 bp, Artificial Sequence
  Description of Artificial Sequence: an artificially synthesized primer sequence
agcagtagcacagcctta

SEQ ID NO: 5161 - DNA, 18 bp, Artificial Sequence
  Description of Artificial Sequence: an artificially synthesized primer sequence
actctaacacatttggca

SEQ ID NO: 5162 - DNA, 18 bp, Artificial Sequence
  Description of Artificial Sequence: an artificially synthesized primer sequence
tattagtgtgagctggca

SEQ ID NO: 5163 - DNA, 18 bp, Artificial Sequence
  Description of Artificial Sequence: an artificially synthesized primer sequence
ataggaggtgtcatgccc

SEQ ID NO: 5164 - DNA, 18 bp, Artificial Sequence
  Description of Artificial Sequence: an artificially synthesized primer sequence
tcttttgacctacactgc

SEQ ID NO: 5165 - DNA, 18 bp, Artificial Sequence
  Description of Artificial Sequence: an artificially synthesized primer sequence
ggggaagggagtaaggtc

SEQ ID NO: 5166 - DNA, 18 bp, Artificial Sequence
  Description of Artificial Sequence: an artificially synthesized primer sequence
acttagcatccagacctc

SEQ ID NO: 5167 - DNA, 18 bp, Artificial Sequence
  Description of Artificial Sequence: an artificially synthesized primer sequence
atactctctgctcatgga

SEQ ID NO: 5168 - DNA, 18 bp, Artificial Sequence
  Description of Artificial Sequence: an artificially synthesized primer sequence
ttcttggcatccttcatt

SEQ ID NO: 5169 - DNA, 18 bp, Artificial Sequence
  Description of Artificial Sequence: an artificially synthesized primer sequence
gaggcttgtctaggggaa

SEQ ID NO: 5170 - DNA, 18 bp, Artificial Sequence
  Description of Artificial Sequence: an artificially synthesized primer sequence
gaacaagggatgcaggat

SEQ ID NO: 5171 - DNA, 18 bp, Artificial Sequence
  Description of Artificial Sequence: an artificially synthesized primer sequence
tatgtgatgttttcccca

SEQ ID NO: 5172 - DNA, 20 bp, Artificial Sequence
  Description of Artificial Sequence: an artificially synthesized primer sequence
ctgcctaaataacactgaag

SEQ ID NO: 5173 - DNA, 18 bp, Artificial Sequence
  Description of Artificial Sequence: an artificially synthesized primer sequence
ctgtcctcatctgtgcat

SEQ ID NO: 5174 - DNA, 18 bp, Artificial Sequence
  Description of Artificial Sequence: an artificially synthesized primer sequence
ggtagaacgggaaatcat

SEQ ID NO: 5175 - DNA, 18 bp, Artificial Sequence
  Description of Artificial Sequence: an artificially synthesized primer sequence
aggtttgagtagagggaa

SEQ ID NO: 5176 - DNA, 18 bp, Artificial Sequence
  Description of Artificial Sequence: an artificially synthesized primer sequence
atacagcagggaagaggc

SEQ ID NO: 5177 - DNA, 19 bp, Artificial Sequence
  Description of Artificial Sequence: an artificially synthesized primer sequence
caatgtgtcttcagtttcc

SEQ ID NO: 5178 - DNA, 18 bp, Artificial Sequence
  Description of Artificial Sequence: an artificially synthesized primer sequence
tcttgatgtctcctgcct

SEQ ID NO: 5179 - DNA, 18 bp, Artificial Sequence
  Description of Artificial Sequence: an artificially synthesized primer sequence
aaagccatcgtacaccat

SEQ ID NO: 5180 - DNA, 19 bp, Artificial Sequence
  Description of Artificial Sequence: an artificially synthesized primer sequence
aattctttagctctgttgc

SEQ ID NO: 5181 - DNA, 18 bp, Artificial Sequence
  Description of Artificial Sequence: an artificially synthesized primer sequence
atccactgccccttatca

SEQ ID NO: 5182 - DNA, 18 bp, Artificial Sequence
  Description of Artificial Sequence: an artificially synthesized primer sequence
ctgctagaatacgcctta

SEQ ID NO: 5183 - DNA, 18 bp, Artificial Sequence
  Description of Artificial Sequence: an artificially synthesized primer sequence
ctcatagttcaaggcagc

SEQ ID NO: 5184 - DNA, 20 bp, Artificial Sequence
  Description of Artificial Sequence: an artificially synthesized primer sequence
gagtaaggtcgtagtcagtg

SEQ ID NO: 5185 - DNA, 18 bp, Artificial Sequence
  Description of Artificial Sequence: an artificially synthesized primer sequence
gcaagagctacagacaaa

SEQ ID NO: 5186 - DNA, 18 bp, Artificial Sequence
  Description of Artificial Sequence: an artificially synthesized primer sequence
gtggtcagtggaaaatgg

SEQ ID NO: 5187 - DNA, 18 bp, Artificial Sequence
  Description of Artificial Sequence: an artificially synthesized primer sequence
gggacagtatggcagaga

SEQ ID NO: 5188 - DNA, 18 bp, Artificial Sequence
  Description of Artificial Sequence: an artificially synthesized primer sequence
gcttgccataggtgtact

SEQ ID NO: 5189 - DNA, 20 bp, Artificial Sequence
  Description of Artificial Sequence: an artificially synthesized primer sequence
tttcagcagttaagtgtttt

SEQ ID NO: 5190 - DNA, 18 bp, Artificial Sequence
  Description of Artificial Sequence: an artificially synthesized primer sequence
tcagaaggtatgcccact

SEQ ID NO: 5191 - DNA, 18 bp, Artificial Sequence
  Description of Artificial Sequence: an artificially synthesized primer sequence
acccttatgtcaaactgc

SEQ ID NO: 5192 - DNA, 18 bp, Artificial Sequence
  Description of Artificial Sequence: an artificially synthesized primer sequence
ttttcctacctgcaatgg

SEQ ID NO: 5193 - DNA, 18 bp, Artificial Sequence
  Description of Artificial Sequence: an artificially synthesized primer sequence
gtcagaagccatacgtgc

SEQ ID NO: 5194 - DNA, 18 bp, Artificial Sequence
  Description of Artificial Sequence: an artificially synthesized primer sequence
caaagtggcctaaaccct

SEQ ID NO: 5195 - DNA, 18 bp, Artificial Sequence
  Description of Artificial Sequence: an artificially synthesized primer sequence
ctggggagataagagcct

SEQ ID NO: 5196 - DNA, 18 bp, Artificial Sequence
  Description of Artificial Sequence: an artificially synthesized primer sequence
ctcagtcacgcaatagat

SEQ ID NO: 5197 - DNA, 18 bp, Artificial Sequence
  Description of Artificial Sequence: an artificially synthesized primer sequence
tctctggaagggaaaatt

SEQ ID NO: 5198 - DNA, 18 bp, Artificial Sequence
  Description of Artificial Sequence: an artificially synthesized primer sequence
aagaaggaatgggcacac

SEQ ID NO: 5199 - DNA, 18 bp, Artificial Sequence
  Description of Artificial Sequence: an artificially synthesized primer sequence
cagtagcaaaaccagagc

SEQ ID NO: 5200 - DNA, 18 bp, Artificial Sequence
  Description of Artificial Sequence: an artificially synthesized primer sequence
gtggaagtgcctgatgag

SEQ ID NO: 5201 - DNA, 18 bp, Artificial Sequence
  Description of Artificial Sequence: an artificially synthesized primer sequence
tacagggtcagttggcag

SEQ ID NO: 5202 - DNA, 18 bp, Artificial Sequence
  Description of Artificial Sequence: an artificially synthesized primer sequence
acacaattcatcactgct

SEQ ID NO: 5203 - DNA, 18 bp, Artificial Sequence
  Description of Artificial Sequence: an artificially synthesized primer sequence
ggttgctgtgagtgcatt

SEQ ID NO: 5204 - DNA, 18 bp, Artificial Sequence
  Description of Artificial Sequence: an artificially synthesized primer sequence
tagaggaggcagtaaggg

SEQ ID NO: 5205 - DNA, 18 bp, Artificial Sequence
  Description of Artificial Sequence: an artificially synthesized primer sequence
agtgtctatggctcttcc

SEQ ID NO: 5206 - DNA, 18 bp, Artificial Sequence
  Description of Artificial Sequence: an artificially synthesized primer sequence
gggtggttctgttaggag

SEQ ID NO: 5207 - DNA, 18 bp, Artificial Sequence
  Description of Artificial Sequence: an artificially synthesized primer sequence
tgctggaaataatcgctt

SEQ ID NO: 5208 - DNA, 19 bp, Artificial Sequence
  Description of Artificial Sequence: an artificially synthesized primer sequence
tgagtgtggtgaagatagt

SEQ ID NO: 5209 - DNA, 18 bp, Artificial Sequence
  Description of Artificial Sequence: an artificially synthesized primer sequence
agaaacctgaacgatgtc

SEQ ID NO: 5210 - DNA, 18 bp, Artificial Sequence
  Description of Artificial Sequence: an artificially synthesized primer sequence
attacgatgctttgttca

SEQ ID NO: 5211 - DNA, 18 bp, Artificial Sequence
  Description of Artificial Sequence: an artificially synthesized primer sequence
taaaattcttgtggttgg

SEQ ID NO: 5212 - DNA, 18 bp, Artificial Sequence
  Description of Artificial Sequence: an artificially synthesized primer sequence
ttgtgcccttagaaaatc

SEQ ID NO: 5213 - DNA, 18 bp, Artificial Sequence
  Description of Artificial Sequence: an artificially synthesized primer sequence
cctgataaccatgaattg

SEQ ID NO: 5214 - DNA, 22 bp, Artificial Sequence
  Description of Artificial Sequence: an artificially synthesized primer sequence
agcatttggttttatactgtta

SEQ ID NO: 5215 - DNA, 19 bp, Artificial Sequence
  Description of Artificial Sequence: an artificially synthesized primer sequence
cgttaccatcacaatttca

SEQ ID NO: 5216 - DNA, 18 bp, Artificial Sequence
  Description of Artificial Sequence: an artificially synthesized primer sequence
acttgagcagaggagagc

SEQ ID NO: 5217 - DNA, 18 bp, Artificial Sequence
  Description of Artificial Sequence: an artificially synthesized primer sequence
actggtatttgctgtgaa

SEQ ID NO: 5218 - DNA, 18 bp, Artificial Sequence
  Description of Artificial Sequence: an artificially synthesized primer sequence
aggaacagaggctacatc

SEQ ID NO: 5219 - DNA, 18 bp, Artificial Sequence
  Description of Artificial Sequence: an artificially synthesized primer sequence
gtctagctgggatgatgg

SEQ ID NO: 5220 - DNA, 18 bp, Artificial Sequence
  Description of Artificial Sequence: an artificially synthesized primer sequence
aagaccccgatagagagc

SEQ ID NO: 5221 - DNA, 18 bp, Artificial Sequence
  Description of Artificial Sequence: an artificially synthesized primer sequence
ccttcttcagtcttgcac

SEQ ID NO: 5222 - DNA, 18 bp, Artificial Sequence
  Description of Artificial Sequence: an artificially synthesized primer sequence
agttttgttcacccctcc

SEQ ID NO: 5223 - DNA, 18 bp, Artificial Sequence
  Description of Artificial Sequence: an artificially synthesized primer sequence
tagaatggtgggaagtgg

SEQ ID NO: 5224 - DNA, 22 bp, Artificial Sequence
  Description of Artificial Sequence: an artificially synthesized primer sequence
ttagtggtctgttgatagtttt

SEQ ID NO: 5225 - DNA, 18 bp, Artificial Sequence
  Description of Artificial Sequence: an artificially synthesized primer sequence
ttgggcttaggtgagtcc

SEQ ID NO: 5226 - DNA, 18 bp, Artificial Sequence
  Description of Artificial Sequence: an artificially synthesized primer sequence
ggtacataaggaatcgct

SEQ ID NO: 5227 - DNA, 18 bp, Artificial Sequence
  Description of Artificial Sequence: an artificially synthesized primer sequence
actctcgcttcctgtcac

SEQ ID NO: 5228 - DNA, 18 bp, Artificial Sequence
  Description of Artificial Sequence: an artificially synthesized primer sequence
gacggacccttgacatta

SEQ ID NO: 5229 - DNA, 18 bp, Artificial Sequence
  Description of Artificial Sequence: an artificially synthesized primer sequence
actgtggagaaggaggga

SEQ ID NO: 5230 - DNA, 18 bp, Artificial Sequence
  Description of Artificial Sequence: an artificially synthesized primer sequence
atttgacgtatccatgcc

SEQ ID NO: 5231 - DNA, 18 bp, Artificial Sequence
  Description of Artificial Sequence: an artificially synthesized primer sequence
tggtaagtggtggaagct

SEQ ID NO: 5232 - DNA, 20 bp, Artificial Sequence
  Description of Artificial Sequence: an artificially synthesized primer sequence
ccaaaacaataatccaacat

SEQ ID NO: 5233 - DNA, 18 bp, Artificial Sequence
  Description of Artificial Sequence: an artificially synthesized primer sequence
agccgttgtcatcataga

SEQ ID NO: 5234 - DNA, 18 bp, Artificial Sequence
  Description of Artificial Sequence: an artificially synthesized primer sequence
attggaagtccctatgat

SEQ ID NO: 5235 - DNA, 18 bp, Artificial Sequence
  Description of Artificial Sequence: an artificially synthesized primer sequence
ctcctctgaagtagctgc

SEQ ID NO: 5236 - DNA, 18 bp, Artificial Sequence
  Description of Artificial Sequence: an artificially synthesized primer sequence
aatggttctctggcttgg

SEQ ID NO: 5237 - DNA, 19 bp, Artificial Sequence
  Description of Artificial Sequence: an artificially synthesized primer sequence
caaaatggttaaacacaaa

SEQ ID NO: 5238 - DNA, 18 bp, Artificial Sequence
  Description of Artificial Sequence: an artificially synthesized primer sequence
agaaaggcacacaataaa

SEQ ID NO: 5239 - DNA, 20 bp, Artificial Sequence
  Description of Artificial Sequence: an artificially synthesized primer sequence
aatttaggggaactgagtac

SEQ ID NO: 5240 - DNA, 18 bp, Artificial Sequence
  Description of Artificial Sequence: an artificially synthesized primer sequence
ttcgctcttatcacccag

SEQ ID NO: 5241 - DNA, 18 bp, Artificial Sequence
  Description of Artificial Sequence: an artificially synthesized primer sequence
acttgccttggaattgct

SEQ ID NO: 5242 - DNA, 18 bp, Artificial Sequence
  Description of Artificial Sequence: an artificially synthesized primer sequence
cagaagaacaggaggcac

SEQ ID NO: 5243 - DNA, 18 bp, Artificial Sequence
  Description of Artificial Sequence: an artificially synthesized primer sequence
gcaacgtcttactgtgaa

SEQ ID NO: 5244 - DNA, 21 bp, Artificial Sequence
  Description of Artificial Sequence: an artificially synthesized primer sequence
gacattgacgtattctaactg

SEQ ID NO: 5245 - DNA, 18 bp, Artificial Sequence
  Description of Artificial Sequence: an artificially synthesized primer sequence
taccctccgctgtgttag

SEQ ID NO: 5246 - DNA, 18 bp, Artificial Sequence
  Description of Artificial Sequence: an artificially synthesized primer sequence
ctcctccagctcttgtcc

SEQ ID NO: 5247 - DNA, 20 bp, Artificial Sequence
  Description of Artificial Sequence: an artificially synthesized primer sequence
ggcacgttttaatataccac

SEQ ID NO: 5248 - DNA, 18 bp, Artificial Sequence
  Description of Artificial Sequence: an artificially synthesized primer sequence
ccctccagacagttcaaa

SEQ ID NO: 5249 - DNA, 18 bp, Artificial Sequence
  Description of Artificial Sequence: an artificially synthesized primer sequence
cgatgggtaggacttaaa

SEQ ID NO: 5250 - DNA, 18 bp, Artificial Sequence
  Description of Artificial Sequence: an artificially synthesized primer sequence
ctcctgacatttcctttt

SEQ ID NO: 5251 - DNA, 18 bp, Artificial Sequence
  Description of Artificial Sequence: an artificially synthesized primer sequence
taggaaaagaagcagggc

SEQ ID NO: 5252 - DNA, 20 bp, Artificial Sequence
  Description of Artificial Sequence: an artificially synthesized primer sequence
agtgaggttagggaaatatc

SEQ ID NO: 5253 - DNA, 18 bp, Artificial Sequence
  Description of Artificial Sequence: an artificially synthesized primer sequence
tattcctgtttgatgggg

SEQ ID NO: 5254 - DNA, 19 bp, Artificial Sequence
  Description of Artificial Sequence: an artificially synthesized primer sequence
tctgtaatagggaggtgtc

SEQ ID NO: 5255 - DNA, 19 bp, Artificial Sequence
  Description of Artificial Sequence: an artificially synthesized primer sequence
gaggtacttttcagacagg

SEQ ID NO: 5256 - DNA, 18 bp, Artificial Sequence
  Description of Artificial Sequence: an artificially synthesized primer sequence
aaaatgaggttcagtccc

SEQ ID NO: 5257 - DNA, 18 bp, Artificial Sequence
  Description of Artificial Sequence: an artificially synthesized primer sequence
tcacctccccattaactg

SEQ ID NO: 5258 - DNA, 18 bp, Artificial Sequence
  Description of Artificial Sequence: an artificially synthesized primer sequence
caccctcgttttctttag

SEQ ID NO: 5259 - DNA, 18 bp, Artificial Sequence
  Description of Artificial Sequence: an artificially synthesized primer sequence
agctaaatccactgaggt

SEQ ID NO: 5260 - DNA, 18 bp, Artificial Sequence
  Description of Artificial Sequence: an artificially synthesized primer sequence
ggacagacttgcagagaa

SEQ ID NO: 5261 - DNA, 18 bp, Artificial Sequence
  Description of Artificial Sequence: an artificially synthesized primer sequence
gggcctagagtggaagtg

SEQ ID NO: 5262 - DNA, 18 bp, Artificial Sequence
  Description of Artificial Sequence: an artificially synthesized primer sequence
agaaccagtccaagccat

SEQ ID NO: 5263 - DNA, 18 bp, Artificial Sequence
  Description of Artificial Sequence: an artificially synthesized primer sequence
ttgataaaatagagccca

SEQ ID NO: 5264 - DNA, 18 bp, Artificial Sequence
  Description of Artificial Sequence: an artificially synthesized primer sequence
agtgtgcagaaatccgtg

SEQ ID NO: 5265 - DNA, 18 bp, Artificial Sequence
  Description of Artificial Sequence: an artificially synthesized primer sequence
tggtcctcatggtacagc

SEQ ID NO: 5266 - DNA, 18 bp, Artificial Sequence
  Description of Artificial Sequence: an artificially synthesized primer sequence
atggctgctagcttgtca

SEQ ID NO: 5267 - DNA, 18 bp, Artificial Sequence
  Description of Artificial Sequence: an artificially synthesized primer sequence
ctgtctgccctgaatctt

SEQ ID NO: 5268 - DNA, 18 bp, Artificial Sequence
  Description of Artificial Sequence: an artificially synthesized primer sequence
ttttgggactggaaggag

SEQ ID NO: 5269 - DNA, 18 bp, Artificial Sequence
  Description of Artificial Sequence: an artificially synthesized primer sequence
tcactcacaccaatcctg

SEQ ID NO: 5270 - DNA, 18 bp, Artificial Sequence
  Description of Artificial Sequence: an artificially synthesized primer sequence
ttcgtaaacatctgggca

SEQ ID NO: 5271 - DNA, 18 bp, Artificial Sequence
  Description of Artificial Sequence: an artificially synthesized primer sequence
aagttgcacccagacatc

SEQ ID NO: 5272 - DNA, 19 bp, Artificial Sequence
  Description of Artificial Sequence: an artificially synthesized primer sequence
tcttatttcacagtttcca

SEQ ID NO: 5273 - DNA, 18 bp, Artificial Sequence
  Description of Artificial Sequence: an artificially synthesized primer sequence
ccccacagaacacttact

SEQ ID NO: 5274 - DNA, 18 bp, Artificial Sequence
  Description of Artificial Sequence: an artificially synthesized primer sequence
agacgtagcagcaactcc

SEQ ID NO: 5275 - DNA, 18 bp, Artificial Sequence
  Description of Artificial Sequence: an artificially synthesized primer sequence
tagacccaaccctcacac

SEQ ID NO: 5276 - DNA, 18 bp, Artificial Sequence
  Description of Artificial Sequence: an artificially synthesized primer sequence
tgagacgaattggtaaaa

SEQ ID NO: 5277 - DNA, 18 bp, Artificial Sequence
  Description of Artificial Sequence: an artificially synthesized primer sequence
cttgacatttgctctcca

SEQ ID NO: 5278 - DNA, 19 bp, Artificial Sequence
  Description of Artificial Sequence: an artificially synthesized primer sequence
aaaactgggtcaaataaaa

SEQ ID NO: 5279 - DNA, 18 bp, Artificial Sequence
  Description of Artificial Sequence: an artificially synthesized primer sequence
tgcccagatagaaaagtg

SEQ ID NO: 5280 - DNA, 18 bp, Artificial Sequence
  Description of Artificial Sequence: an artificially synthesized primer sequence
ggccttgttgaatctgaa

SEQ ID NO: 5281 - DNA, 18 bp, Artificial Sequence
  Description of Artificial Sequence: an artificially synthesized primer sequence
ctcaacacaactccaagc

SEQ ID NO: 5282 - DNA, 18 bp, Artificial Sequence
  Description of Artificial Sequence: an artificially synthesized primer sequence
ccaaacgaatgtcaagct

SEQ ID NO: 5283 - DNA, 18 bp, Artificial Sequence
  Description of Artificial Sequence: an artificially synthesized primer sequence
atctgctcttcatccctt

SEQ ID NO: 5284 - DNA, 18 bp, Artificial Sequence
  Description of Artificial Sequence: an artificially synthesized primer sequence
cctgttcctagaccgcat

SEQ ID NO: 5285 - DNA, 18 bp, Artificial Sequence
  Description of Artificial Sequence: an artificially synthesized primer sequence
ggccagacaggaagagtt

SEQ ID NO: 5286 - DNA, 18 bp, Artificial Sequence
  Description of Artificial Sequence: an artificially synthesized primer sequence
aagttgatgctcctgttg

SEQ ID NO: 5287 - DNA, 18 bp, Artificial Sequence
  Description of Artificial Sequence: an artificially synthesized primer sequence
taacacatggactgctgg

SEQ ID NO: 5288 - DNA, 18 bp, Artificial Sequence
  Description of Artificial Sequence: an artificially synthesized primer sequence
aaggtaggaaatgccagc

SEQ ID NO: 5289 - DNA, 18 bp, Artificial Sequence
  Description of Artificial Sequence: an artificially synthesized primer sequence
ttttgaccataagctcct

SEQ ID NO: 5290 - DNA, 22 bp, Artificial Sequence
  Description of Artificial Sequence: an artificially synthesized primer sequence
cgagaaataactaatacacctg

SEQ ID NO: 5291 - DNA, 18 bp, Artificial Sequence
  Description of Artificial Sequence: an artificially synthesized primer sequence
gagggtgaagcaggtagg

SEQ ID NO: 5292 - DNA, 19 bp, Artificial Sequence
  Description of Artificial Sequence: an artificially synthesized primer sequence
ggcatttcccttgtatatt

SEQ ID NO: 5293 - DNA, 18 bp, Artificial Sequence
  Description of Artificial Sequence: an artificially synthesized primer sequence
ccgtgtattcagctccct

SEQ ID NO: 5294 - DNA, 18 bp, Artificial Sequence
  Description of Artificial Sequence: an artificially synthesized primer sequence
taaacgggaatcaggaag

SEQ ID NO: 5295 - DNA, 20 bp, Artificial Sequence
  Description of Artificial Sequence: an artificially synthesized primer sequence
tttcagacatatcaagttca

SEQ ID NO: 5296 - DNA, 18 bp, Artificial Sequence
  Description of Artificial Sequence: an artificially synthesized primer sequence
attccagccatacggtta

SEQ ID NO: 5297 - DNA, 18 bp, Artificial Sequence
  Description of Artificial Sequence: an artificially synthesized primer sequence
aaaaccacaggaagaaag

SEQ ID NO: 5298 - DNA, 18 bp, Artificial Sequence
  Description of Artificial Sequence: an artificially synthesized primer sequence
tacaagttcacctgcatt

SEQ ID NO: 5299 - DNA, 18 bp, Artificial Sequence
  Description of Artificial Sequence: an artificially synthesized primer sequence
aaccactcagcagaaaga

SEQ ID NO: 5300 - DNA, 18 bp, Artificial Sequence
  Description of Artificial Sequence: an artificially synthesized primer sequence
tgtccatagagccagtta

SEQ ID NO: 5301 - DNA, 18 bp, Artificial Sequence
  Description of Artificial Sequence: an artificially synthesized primer sequence
gttctgttggaggtgctg

SEQ ID NO: 5302 - DNA, 18 bp, Artificial Sequence
  Description of Artificial Sequence: an artificially synthesized primer sequence
aggtcttttgtgtgctga

SEQ ID NO: 5303 - DNA, 18 bp, Artificial Sequence
  Description of Artificial Sequence: an artificially synthesized primer sequence
gtagttgtcctgcatggc

SEQ ID NO: 5304 - DNA, 18 bp, Artificial Sequence
  Description of Artificial Sequence: an artificially synthesized primer sequence
ggccaggatactacactt

SEQ ID NO: 5305 - DNA, 18 bp, Artificial Sequence
  Description of Artificial Sequence: an artificially synthesized primer sequence
aactggcattggagacct

SEQ ID NO: 5306 - DNA, 19 bp, Artificial Sequence
  Description of Artificial Sequence: an artificially synthesized primer sequence
ttggtttgtgatgttaagt

SEQ ID NO: 5307 - DNA, 18 bp, Artificial Sequence
  Description of Artificial Sequence: an artificially synthesized primer sequence
tttgtcttccggtagtta

SEQ ID NO: 5308 - DNA, 18 bp, Artificial Sequence
  Description of Artificial Sequence: an artificially synthesized primer sequence
tgccactcttgaaaactc

SEQ ID NO: 5309 - DNA, 18 bp, Artificial Sequence
  Description of Artificial Sequence: an artificially synthesized primer sequence
tccattacacaacagcct

SEQ ID NO: 5310 - DNA, 18 bp, Artificial Sequence
  Description of Artificial Sequence: an artificially synthesized primer sequence
ggcagacttgtttgagct

SEQ ID NO: 5311 - DNA, 18 bp, Artificial Sequence
  Description of Artificial Sequence: an artificially synthesized primer sequence
tagttctgttgaggcccc

SEQ ID NO: 5312 - DNA, 18 bp, Artificial Sequence
  Description of Artificial Sequence: an artificially synthesized primer sequence
cctgtttctcttcctgaa

SEQ ID NO: 5313 - DNA, 18 bp, Artificial Sequence
  Description of Artificial Sequence: an artificially synthesized primer sequence
ctaagtccagaagcctcg

SEQ ID NO: 5314 - DNA, 18 bp, Artificial Sequence
  Description of Artificial Sequence: an artificially synthesized primer sequence
ataccatgctccaacacc

SEQ ID NO: 5315 - DNA, 18 bp, Artificial Sequence
  Description of Artificial Sequence: an artificially synthesized primer sequence
ttcacttttgttctccag

SEQ ID NO: 5316 - DNA, 18 bp, Artificial Sequence
  Description of Artificial Sequence: an artificially synthesized primer sequence
cctccactcttcctgttg

SEQ ID NO: 5317 - DNA, 18 bp, Artificial Sequence
  Description of Artificial Sequence: an artificially synthesized primer sequence
ctaagaagtcctggttgg

SEQ ID NO: 5318 - DNA, 18 bp, Artificial Sequence
  Description of Artificial Sequence: an artificially synthesized primer sequence
ttttgtctgaatttggaa

SEQ ID NO: 5319 - DNA, 18 bp, Artificial Sequence
  Description of Artificial Sequence: an artificially synthesized primer sequence
tgtagaaagcctaacccc

SEQ ID NO: 5320 - DNA, 18 bp, Artificial Sequence
  Description of Artificial Sequence: an artificially synthesized primer sequence
actgggcacattcataaa

SEQ ID NO: 5321 - DNA, 18 bp, Artificial Sequence
  Description of Artificial Sequence: an artificially synthesized primer sequence
gttctatgccttgagcct

SEQ ID NO: 5322 - DNA, 18 bp, Artificial Sequence
  Description of Artificial Sequence: an artificially synthesized primer sequence
aactctgggtaccaactt

SEQ ID NO: 5323 - DNA, 18 bp, Artificial Sequence
  Description of Artificial Sequence: an artificially synthesized primer sequence
ctccctctcctttcctca

SEQ ID NO: 5324 - DNA, 18 bp, Artificial Sequence
  Description of Artificial Sequence: an artificially synthesized primer sequence
cgttttctcgatgtccag

SEQ ID NO: 5325 - DNA, 18 bp, Artificial Sequence
  Description of Artificial Sequence: an artificially synthesized primer sequence
aacattccttgcagctca

SEQ ID NO: 5326 - DNA, 18 bp, Artificial Sequence
  Description of Artificial Sequence: an artificially synthesized primer sequence
agagtgagctgtgccttg

SEQ ID NO: 5327 - DNA, 18 bp, Artificial Sequence
  Description of Artificial Sequence: an artificially synthesized primer sequence
ccaagacatacccaggct

SEQ ID NO: 5328 - DNA, 18 bp, Artificial Sequence
  Description of Artificial Sequence: an artificially synthesized primer sequence
aattgtgacaagcagcag

SEQ ID NO: 5329 - DNA, 18 bp, Artificial Sequence
  Description of Artificial Sequence: an artificially synthesized primer sequence
tgttcatgtcactggctg

SEQ ID NO: 5330 - DNA, 18 bp, Artificial Sequence
  Description of Artificial Sequence: an artificially synthesized primer sequence
cttcatagggcagactcc

SEQ ID NO: 5331 - DNA, 18 bp, Artificial Sequence
  Description of Artificial Sequence: an artificially synthesized primer sequence
gctgtgaactagaggggc

SEQ ID NO: 5332 - DNA, 18 bp, Artificial Sequence
  Description of Artificial Sequence: an artificially synthesized primer sequence
ggagaaaccgatgaagaa

SEQ ID NO: 5333 - DNA, 18 bp, Artificial Sequence
  Description of Artificial Sequence: an artificially synthesized primer sequence
tttaatagtgccctgtgg

SEQ ID NO: 5334 - DNA, 18 bp, Artificial Sequence
  Description of Artificial Sequence: an artificially synthesized primer sequence
ctctggaatttgcattga

SEQ ID NO: 5335 - DNA, 18 bp, Artificial Sequence
  Description of Artificial Sequence: an artificially synthesized primer sequence
caagactatggaggggag

SEQ ID NO: 5336 - DNA, 18 bp, Artificial Sequence
  Description of Artificial Sequence: an artificially synthesized primer sequence
ctcctcttgcattctccc

SEQ ID NO: 5337 - DNA, 18 bp, Artificial Sequence
  Description of Artificial Sequence: an artificially synthesized primer sequence
ccagttatatccccaaaa

SEQ ID NO: 5338 - DNA, 20 bp, Artificial Sequence
  Description of Artificial Sequence: an artificially synthesized primer sequence
cataaaaccgaataactgag

SEQ ID NO: 5339 - DNA, 18 bp, Artificial Sequence
  Description of Artificial Sequence: an artificially synthesized primer sequence
agtgtttgtgggcataga

SEQ ID NO: 5340 - DNA, 18 bp, Artificial Sequence
  Description of Artificial Sequence: an artificially synthesized primer sequence
acttcagacctccctaga

SEQ ID NO: 5341 - DNA, 18 bp, Artificial Sequence
  Description of Artificial Sequence: an artificially synthesized primer sequence
ttattgaaggaaagccgc

SEQ ID NO: 5342 - DNA, 18 bp, Artificial Sequence
  Description of Artificial Sequence: an artificially synthesized primer sequence
ccctgccttccctataga

SEQ ID NO: 5343 - DNA, 18 bp, Artificial Sequence
  Description of Artificial Sequence: an artificially synthesized primer sequence
gggaaatagaggagtgat

SEQ ID NO: 5344 - DNA, 18 bp, Artificial Sequence
  Description of Artificial Sequence: an artificially synthesized primer sequence
tggtttcagatgtgcctt

SEQ ID NO: 5345 - DNA, 18 bp, Artificial Sequence
  Description of Artificial Sequence: an artificially synthesized primer sequence
tggaagaacgaaagagcc

SEQ ID NO: 5346 - DNA, 18 bp, Artificial Sequence
  Description of Artificial Sequence: an artificially synthesized primer sequence
tccagggtgtcgtagaag

SEQ ID NO: 5347 - DNA, 18 bp, Artificial Sequence
  Description of Artificial Sequence: an artificially synthesized primer sequence
gcacgttaaggactgttt

SEQ ID NO: 5348 - DNA, 18 bp, Artificial Sequence
  Description of Artificial Sequence: an artificially synthesized primer sequence
tgtgcctgactaggtgag

SEQ ID NO: 5349 - DNA, 18 bp, Artificial Sequence
  Description of Artificial Sequence: an artificially synthesized primer sequence
aaggacaggtgagtgtgg

SEQ ID NO: 5350 - DNA, 18 bp, Artificial Sequence
  Description of Artificial Sequence: an artificially synthesized primer sequence
tggagtacaacctgcatc

SEQ ID NO: 5351 - DNA, 18 bp, Artificial Sequence
  Description of Artificial Sequence: an artificially synthesized primer sequence
tgtctggtagagttgcgg

SEQ ID NO: 5352 - DNA, 19 bp, Artificial Sequence
  Description of Artificial Sequence: an artificially synthesized primer sequence
tgatttaatgagtggaacc

SEQ ID NO: 5353 - DNA, 18 bp, Artificial Sequence
  Description of Artificial Sequence: an artificially synthesized primer sequence
catgtgaccttctctggc

SEQ ID NO: 5354 - DNA, 18 bp, Artificial Sequence
  Description of Artificial Sequence: an artificially synthesized primer sequence
cagttctttagccaggga

SEQ ID NO: 5355 - DNA, 18 bp, Artificial Sequence
  Description of Artificial Sequence: an artificially synthesized primer sequence
ccttttgtctgattcgtc

SEQ ID NO: 5356 - DNA, 18 bp, Artificial Sequence
  Description of Artificial Sequence: an artificially synthesized primer sequence
ccttaccaaactcatcca

SEQ ID NO: 5357 - DNA, 18 bp, Artificial Sequence
  Description of Artificial Sequence: an artificially synthesized primer sequence
cgtgcatgaaagtgagtc

SEQ ID NO: 5358 - DNA, 18 bp, Artificial Sequence
  Description of Artificial Sequence: an artificially synthesized primer sequence
cttctcaatcatcaggga

SEQ ID NO: 5359 - DNA, 18 bp, Artificial Sequence
  Description of Artificial Sequence: an artificially synthesized primer sequence
ttctctgcactccttgat

SEQ ID NO: 5360 - DNA, 18 bp, Artificial Sequence
  Description of Artificial Sequence: an artificially synthesized primer sequence
gagtgtctggcatggtta

SEQ ID NO: 5361 - DNA, 18 bp, Artificial Sequence
  Description of Artificial Sequence: an artificially synthesized primer sequence
aagctgggatgataaggg

SEQ ID NO: 5362 - DNA, 18 bp, Artificial Sequence
  Description of Artificial Sequence: an artificially synthesized primer sequence
cttcttggtgctgctttt

SEQ ID NO: 5363 - DNA, 19 bp, Artificial Sequence
  Description of Artificial Sequence: an artificially synthesized primer sequence
gcagatatgtttgtgagag

SEQ ID NO: 5364 - DNA, 18 bp, Artificial Sequence
  Description of Artificial Sequence: an artificially synthesized primer sequence
aataaactacaccagggc

SEQ ID NO: 5365 - DNA, 18 bp, Artificial Sequence
  Description of Artificial Sequence: an artificially synthesized primer sequence
tcctacgttgagttgcct

SEQ ID NO: 5366 - DNA, 18 bp, Artificial Sequence
  Description of Artificial Sequence: an artificially synthesized primer sequence
gtccactagaagagggtc

SEQ ID NO: 5367 - DNA, 18 bp, Artificial Sequence
  Description of Artificial Sequence: an artificially synthesized primer sequence
gaaagctgtcgttaaggt

SEQ ID NO: 5368 - DNA, 18 bp, Artificial Sequence
  Description of Artificial Sequence: an artificially synthesized primer sequence
aatgacaggtgagtgggt

SEQ ID NO: 5369 - DNA, 18 bp, Artificial Sequence
  Description of Artificial Sequence: an artificially synthesized primer sequence
aattcaccaggctgtgtg

SEQ ID NO: 5370 - DNA, 18 bp, Artificial Sequence
  Description of Artificial Sequence: an artificially synthesized primer sequence
tggatttggaagagacct

SEQ ID NO: 5371 - DNA, 18 bp, Artificial Sequence
  Description of Artificial Sequence: an artificially synthesized primer sequence
tttgggtggaagtagaga

SEQ ID NO: 5372 - DNA, 18 bp, Artificial Sequence
  Description of Artificial Sequence: an artificially synthesized primer sequence
gctggttattcacgtggt

SEQ ID NO: 5373 - DNA, 18 bp, Artificial Sequence
  Description of Artificial Sequence: an artificially synthesized primer sequence
tggtcatactcactgccc

SEQ ID NO: 5374 - DNA, 19 bp, Artificial Sequence
  Description of Artificial Sequence: an artificially synthesized primer sequence
gacctggtcatactcactg

SEQ ID NO: 5375 - DNA, 22 bp, Artificial Sequence
  Description of Artificial Sequence: an artificially synthesized primer sequence
ctaaagtccaaaatgtgtaagt

SEQ ID NO: 5376 - DNA, 18 bp, Artificial Sequence
  Description of Artificial Sequence: an artificially synthesized primer sequence
gctaaggtgctatgaagg

SEQ ID NO: 5377 - DNA, 18 bp, Artificial Sequence
  Description of Artificial Sequence: an artificially synthesized primer sequence
acagtaaaagggcaagtg

SEQ ID NO: 5378 - DNA, 18 bp, Artificial Sequence
  Description of Artificial Sequence: an artificially synthesized primer sequence
aatactcacatgccaagc

SEQ ID NO: 5379 - DNA, 18 bp, Artificial Sequence
  Description of Artificial Sequence: an artificially synthesized primer sequence
cttggttacagaggacag

SEQ ID NO: 5380 - DNA, 18 bp, Artificial Sequence
  Description of Artificial Sequence: an artificially synthesized primer sequence
attccactctgctcaaag

SEQ ID NO: 5381 - DNA, 18 bp, Artificial Sequence
  Description of Artificial Sequence: an artificially synthesized primer sequence
ccttgttgtccatgagtc

SEQ ID NO: 5382 - DNA, 18 bp, Artificial Sequence
  Description of Artificial Sequence: an artificially synthesized primer sequence
cgtacaccacatagctga

SEQ ID NO: 5383 - DNA, 20 bp, Artificial Sequence
  Description of Artificial Sequence: an artificially synthesized primer sequence
tggtagaaagagagtcacat

SEQ ID NO: 5384 - DNA, 18 bp, Artificial Sequence
  Description of Artificial Sequence: an artificially synthesized primer sequence
tagagcacgtttccctga

SEQ ID NO: 5385 - DNA, 18 bp, Artificial Sequence
  Description of Artificial Sequence: an artificially synthesized primer sequence
tctggaaaatgagggtta

SEQ ID NO: 5386 - DNA, 18 bp, Artificial Sequence
  Description of Artificial Sequence: an artificially synthesized primer sequence
ccagctttcttcatcatc

SEQ ID NO: 5387 - DNA, 18 bp, Artificial Sequence
  Description of Artificial Sequence: an artificially synthesized primer sequence
aggagtgtggcatagtca

SEQ ID NO: 5388 - DNA, 18 bp, Artificial Sequence
  Description of Artificial Sequence: an artificially synthesized primer sequence
aaagccatcagacctcat

SEQ ID NO: 5389 - DNA, 19 bp, Artificial Sequence
  Description of Artificial Sequence: an artificially synthesized primer sequence
gtcccatgatttagaactc

SEQ ID NO: 5390 - DNA, 18 bp, Artificial Sequence
  Description of Artificial Sequence: an artificially synthesized primer sequence
ctgcactagccttttcca

SEQ ID NO: 5391 - DNA, 18 bp, Artificial Sequence
  Description of Artificial Sequence: an artificially synthesized primer sequence
ggaagacaggacccaagt

SEQ ID NO: 5392 - DNA, 18 bp, Artificial Sequence
  Description of Artificial Sequence: an artificially synthesized primer sequence
tgttggactagaggggaa

SEQ ID NO: 5393 - DNA, 18 bp, Artificial Sequence
  Description of Artificial Sequence: an artificially synthesized primer sequence
tccaggtctcattctctc

SEQ ID NO: 5394 - DNA, 18 bp, Artificial Sequence
  Description of Artificial Sequence: an artificially synthesized primer sequence
tccctatcagacgaccag

SEQ ID NO: 5395 - DNA, 18 bp, Artificial Sequence
  Description of Artificial Sequence: an artificially synthesized primer sequence
aaatcaccctgcttgtca

SEQ ID NO: 5396 - DNA, 18 bp, Artificial Sequence
  Description of Artificial Sequence: an artificially synthesized primer sequence
agaagccagggaagaggt

SEQ ID NO: 5397 - DNA, 18 bp, Artificial Sequence
  Description of Artificial Sequence: an artificially synthesized primer sequence
ctagctctgaagtggcat

SEQ ID NO: 5398 - DNA, 18 bp, Artificial Sequence
  Description of Artificial Sequence: an artificially synthesized primer sequence
tgaagagattacccaggt

SEQ ID NO: 5399 - DNA, 21 bp, Artificial Sequence
  Description of Artificial Sequence: an artificially synthesized primer sequence
ggactctgtagatgtaactga

SEQ ID NO: 5400 - DNA, 18 bp, Artificial Sequence
  Description of Artificial Sequence: an artificially synthesized primer sequence
ttctgggtaagcctgatt

SEQ ID NO: 5401 - DNA, 20 bp, Artificial Sequence
  Description of Artificial Sequence: an artificially synthesized primer sequence
caaagaataccacaaatagc

SEQ ID NO: 5402 - DNA, 18 bp, Artificial Sequence
  Description of Artificial Sequence: an artificially synthesized primer sequence
ccaaggctaaagagagag

SEQ ID NO: 5403 - DNA, 18 bp, Artificial Sequence
  Description of Artificial Sequence: an artificially synthesized primer sequence
aatctcaaggaccagttt

SEQ ID NO: 5404 - DNA, 18 bp, Artificial Sequence
  Description of Artificial Sequence: an artificially synthesized primer sequence
gacacaatggactcaaaa

SEQ ID NO: 5405 - DNA, 18 bp, Artificial Sequence
  Description of Artificial Sequence: an artificially synthesized primer sequence
acagaaggccacagtcag

SEQ ID NO: 5406 - DNA, 19 bp, Artificial Sequence
  Description of Artificial Sequence: an artificially synthesized primer sequence
caaggatactgtgatgaaa

SEQ ID NO: 5407 - DNA, 19 bp, Artificial Sequence
  Description of Artificial Sequence: an artificially synthesized primer sequence
ggtggttaggacatttctc

SEQ ID NO: 5408 - DNA, 21 bp, Artificial Sequence
  Description of Artificial Sequence: an artificially synthesized primer sequence
aaggagtggatagatgaatag

SEQ ID NO: 5409 - DNA, 18 bp, Artificial Sequence
  Description of Artificial Sequence: an artificially synthesized primer sequence
tggttacaaagtcacagg

SEQ ID NO: 5410 - DNA, 18 bp, Artificial Sequence
  Description of Artificial Sequence: an artificially synthesized primer sequence
ttcacttttgtttcccag

SEQ ID NO: 5411 - DNA, 18 bp, Artificial Sequence
  Description of Artificial Sequence: an artificially synthesized primer sequence
ataccactaaggcccagg

SEQ ID NO: 5412 - DNA, 18 bp, Artificial Sequence
  Description of Artificial Sequence: an artificially synthesized primer sequence
gactctttcagctgctgc

SEQ ID NO: 5413 - DNA, 18 bp, Artificial Sequence
  Description of Artificial Sequence: an artificially synthesized primer sequence
caaatggacaggaactta

SEQ ID NO: 5414 - DNA, 18 bp, Artificial Sequence
  Description of Artificial Sequence: an artificially synthesized primer sequence
agaaaaccagatagggcc

SEQ ID NO: 5415 - DNA, 18 bp, Artificial Sequence
  Description of Artificial Sequence: an artificially synthesized primer sequence
taatgcagggaatggagt

SEQ ID NO: 5416 - DNA, 18 bp, Artificial Sequence
  Description of Artificial Sequence: an artificially synthesized primer sequence
cattatacacacgacgaa

SEQ ID NO: 5417 - DNA, 18 bp, Artificial Sequence
  Description of Artificial Sequence: an artificially synthesized primer sequence
aaacccacagtgcttcat

SEQ ID NO: 5418 - DNA, 18 bp, Artificial Sequence
  Description of Artificial Sequence: an artificially synthesized primer sequence
agtccctctcatttccag

SEQ ID NO: 5419 - DNA, 18 bp, Artificial Sequence
  Description of Artificial Sequence: an artificially synthesized primer sequence
tgccataattctcctttt

SEQ ID NO: 5420 - DNA, 18 bp, Artificial Sequence
  Description of Artificial Sequence: an artificially synthesized primer sequence
gcttttctccttccatga

SEQ ID NO: 5421 - DNA, 18 bp, Artificial Sequence
  Description of Artificial Sequence: an artificially synthesized primer sequence
ctacgcccactatattca

SEQ ID NO: 5422 - DNA, 19 bp, Artificial Sequence
  Description of Artificial Sequence: an artificially synthesized primer sequence
agatactgagaatgagcct

SEQ ID NO: 5423 - DNA, 18 bp, Artificial Sequence
  Description of Artificial Sequence: an artificially synthesized primer sequence
tttccatgcctacccttt

SEQ ID NO: 5424 - DNA, 18 bp, Artificial Sequence
  Description of Artificial Sequence: an artificially synthesized primer sequence
agtctcctgctggctaag

SEQ ID NO: 5425 - DNA, 18 bp, Artificial Sequence
  Description of Artificial Sequence: an artificially synthesized primer sequence
gtcccttctgtctcctga

SEQ ID NO: 5426 - DNA, 18 bp, Artificial Sequence
  Description of Artificial Sequence: an artificially synthesized primer sequence
gtggaagtgcctgatgag

SEQ ID NO: 5427 - DNA, 18 bp, Artificial Sequence
  Description of Artificial Sequence: an artificially synthesized primer sequence
ctttcacctgggatggat

SEQ ID NO: 5428 - DNA, 19 bp, Artificial Sequence
  Description of Artificial Sequence: an artificially synthesized primer sequence
aacatagtcatttcgttca

SEQ ID NO: 5429 - DNA, 18 bp, Artificial Sequence
  Description of Artificial Sequence: an artificially synthesized primer sequence
gagcactgtaagagccat

SEQ ID NO: 5430 - DNA, 18 bp, Artificial Sequence
  Description of Artificial Sequence: an artificially synthesized primer sequence
aaacataccacggagaga

SEQ ID NO: 5431 - DNA, 18 bp, Artificial Sequence
  Description of Artificial Sequence: an artificially synthesized primer sequence
tatgagcacacgaggtcc

SEQ ID NO: 5432 - DNA, 18 bp, Artificial Sequence
  Description of Artificial Sequence: an artificially synthesized primer sequence
aagagggaacatcaggct

SEQ ID NO: 5433 - DNA, 18 bp, Artificial Sequence
  Description of Artificial Sequence: an artificially synthesized primer sequence
ttcttgggctttatgtgg

SEQ ID NO: 5434 - DNA, 18 bp, Artificial Sequence
  Description of Artificial Sequence: an artificially synthesized primer sequence
gcagtgagtcgtagatga

SEQ ID NO: 5435 - DNA, 18 bp, Artificial Sequence
  Description of Artificial Sequence: an artificially synthesized primer sequence
ctgcctagccctctcact

SEQ ID NO: 5436 - DNA, 18 bp, Artificial Sequence
  Description of Artificial Sequence: an artificially synthesized primer sequence
actgtgaagagcctgttg

SEQ ID NO: 5437 - DNA, 23 bp, Artificial Sequence
  Description of Artificial Sequence: an artificially synthesized primer sequence
ggaatagtaaggacataatgaca

SEQ ID NO: 5438 - DNA, 18 bp, Artificial Sequence
  Description of Artificial Sequence: an artificially synthesized primer sequence
ggaaccttttgtaaccct

SEQ ID NO: 5439 - DNA, 20 bp, Artificial Sequence
  Description of Artificial Sequence: an artificially synthesized primer sequence
gccacaacatcattttactt

SEQ ID NO: 5440 - DNA, 18 bp, Artificial Sequence
  Description of Artificial Sequence: an artificially synthesized primer sequence
aagtaaaagacatcggca

SEQ ID NO: 5441 - DNA, 18 bp, Artificial Sequence
  Description of Artificial Sequence: an artificially synthesized primer sequence
tacctccagacttttgtg

SEQ ID NO: 5442 - DNA, 18 bp, Artificial Sequence
  Description of Artificial Sequence: an artificially synthesized primer sequence
aggatgggaagaaggttt

SEQ ID NO: 5443 - DNA, 18 bp, Artificial Sequence
  Description of Artificial Sequence: an artificially synthesized primer sequence
ggatgagttgtgtgaaaa

SEQ ID NO: 5444 - DNA, 18 bp, Artificial Sequence
  Description of Artificial Sequence: an artificially synthesized primer sequence
ccaaggctaaagagagag

SEQ ID NO: 5445 - DNA, 18 bp, Artificial Sequence
  Description of Artificial Sequence: an artificially synthesized primer sequence
aagtagagaatcccagct

SEQ ID NO: 5446 - DNA, 18 bp, Artificial Sequence
  Description of Artificial Sequence: an artificially synthesized primer sequence
tttatgattgaggggacc

SEQ ID NO: 5447 - DNA, 18 bp, Artificial Sequence
  Description of Artificial Sequence: an artificially synthesized primer sequence
acagcatccaatcaaaga

SEQ ID NO: 5448 - DNA, 18 bp, Artificial Sequence
  Description of Artificial Sequence: an artificially synthesized primer sequence
acatctggtggaagcatc

SEQ ID NO: 5449 - DNA, 18 bp, Artificial Sequence
  Description of Artificial Sequence: an artificially synthesized primer sequence
accttaacccctcttccc

SEQ ID NO: 5450 - DNA, 18 bp, Artificial Sequence
  Description of Artificial Sequence: an artificially synthesized primer sequence
aaggaagccaactcatgc

SEQ ID NO: 5451 - DNA, 18 bp, Artificial Sequence
  Description of Artificial Sequence: an artificially synthesized primer sequence
accttaacccctcttccc

SEQ ID NO: 5452 - DNA, 18 bp, Artificial Sequence
  Description of Artificial Sequence: an artificially synthesized primer sequence
tagaaaggggtggtgaga

SEQ ID NO: 5453 - DNA, 18 bp, Artificial Sequence
  Description of Artificial Sequence: an artificially synthesized primer sequence
cgttgagagcttttacag

SEQ ID NO: 5454 - DNA, 18 bp, Artificial Sequence
  Description of Artificial Sequence: an artificially synthesized primer sequence
ccactttgagagaaccct

SEQ ID NO: 5455 - RNA, 30 nt, Artificial Sequence
  Description of Artificial Sequence: an artificially synthesized oligo-cap linker sequence
agcaucgagucggccuuguuggccuacugg

SEQ ID NO: 5456 - DNA, 42 bp, Artificial Sequence
  Description of Artificial Sequence: an artificially synthesized oligo(dT) primer sequence
gcggctgaagacggcctatgtggccttttttttttttttttt

SEQ ID NO: 5457 - DNA, 21 bp, Artificial Sequence
  Description of Artificial Sequence: an artificially synthesized primer sequence
agcatcgagtcggccttgttg

SEQ ID NO: 5458 - DNA, 21 bp, Artificial Sequence
  Description of Artificial Sequence: an artificially synthesized primer sequence
gcggctgaagacggcctatgt
